(19) United States
(12) Patent Application Publication
(10) Pub. No.: US 2024/0218398 A1
(43) Pub. Date: Jul. 4, 2024

(54) ENGINEERED EXTRACELLULAR VESICLES

(71) Applicant: CORNELL UNIVERSITY, Ithaca, NY (US)

(72) Inventors: Shaoyi JIANG, Ithaca, NY (US); Wenchao GU, Ithaca, NY (US); Sijin LUOZHONG, Ithaca, NY (US); Zhefan YUAN, Ithaca, NY (US)

(73) Assignee: CORNELL UNIVERSITY, Ithaca, NY (US)

(21) Appl. No.: 18/289,191

(22) PCT Filed: May 4, 2022
(86) PCT No.: PCT/US2022/027568

§ 371 Date: Nov. 1, 2023

Related U.S. Application Data
(60) Provisional application No. 63/183,749, filed on May 4, 2021.

(51) Int. Cl. C12N 15/88; C12N 9/22; C12N 15/11; C12N 15/67

(52) U.S. Cl. CPC C12N 15/88; C12N 9/22; C12N 15/11; C12N 15/67; C12N 2310/20; C12N 2510/00

(57) ABSTRACT

Compositions of engineered extracellular vesicles for delivery of cargo to targeted tissues and cells are described herein. Also described herein are methods for making and using the extracellular vesicles described herein. Lastly, described herein are methods for treating a subject, the method comprising administering to a subject an extracellular vesicle as described herein.

### CROSS REFERENCE TO RELATED APPLICATIONS

[0001] This application claims the benefit of U.S. Provisional Patent Application No. 63/183,749, filed May 4, 2021, the contents of which is incorporated herein by reference in its entirety.

### INCORPORATION BY REFERENCE OF SEQUENCE LISTING

[0002] The Sequence Listing in an ASCII text file, named as 39604WO_9704_02_PC_SequenceListing.txt of 854 KB, created on May 3, 2022, and submitted to the United States Patent and Trademark Office via EFS-Web, is incorporated herein by reference.

### BACKGROUND

[0003] Administrating diagnostic or therapeutic agents to a site of interest with precision has presented an ongoing challenge. Currently, two major types of gene therapy delivery systems are viral and non-viral (Y. K. Sung & S. W. Kim, Biomater Res 23, 8 (2019); N. Nayerossadat, et al., Adv Biomed Res 1, 27 (2012)). For viral vectors, safety is the main concern albeit highly effective. Non-viral carriers, including polyplexes and lipoplexes, particularly lipid nanoparticles (LNPs), often suffer from lack of targeting specificity. Recent studies have brought increasing interest in extracellular vesicles (EVs) as a new class of promising carriers for RNA drug delivery, due to their biocompatibility, endogenous function to mediate intercellular exchange of molecules, and native ability to target specific tissues and cross the blood brain barrier (BBB) (Tang et al., Front Oncol 9, 1208 (2019); Aslan et al., BMC Biotechnol 21, 20 (2021); Ridder et al., PLOS Biol 12, e1001874 (2014); Haney et al., J Control Release 207, 18-30 (2015); Alvarez-Erviti et al., Nat Biotechnol 29, 341-345 (2011); Andras & Toborek, Tissue Barriers 4, e1131804 (2016); van Niel et al., Nat Rev Mol Cell Biol 19, 213-228 (2018)). However, the clinical translation of EV-based therapies is hampered by a lack of control over which molecules are loaded from the EV-producing donor cell into the EV. Depending on the donor cell type, the cargo of EVs may include proteins, DNA, RNAs, lipids, nutrients, and metabolic wastes. Unwanted cellular components cannot be excluded from EVs, not only compromising the loading capacity, but also delivering potentially harmful components to the target, such as overexpressed constructs introduced to engineer EVs and cellular waste.

[0004] Many systems have been developed to load small RNA cargos, such as siRNAs and microRNAs into EVs, but active enrichment of long mRNAs in EVs remains a challenge (Aslan et al., BMC Biotechnol 21, 20 (2021)). Extremely low copy numbers of endogenous EV-associated RNAs were reported, ranging from 0.02 to 1 RNA per EV and small RNAs are more efficiently packaged into EVs than long mRNAs (0.01 to 1 microRNA vs. 0.001 long intact RNA per EV) (Mosbach et al., Cells 10, (2021); M. Li et al., Philos Trans R Soc Lond B Biol Sci 369, (2014); Chevillet et al., Proc Natl Acad Sci USA 111, 14888-14893 (2014); Z. Wei et al., Nat Commun 8, 1145 (2017)). Only 8% of mRNAs in donor cells may be detected in their EVs (H. Valadi et al., Nat Cell Biol 9, 654-659 (2007)). Previously reported methods loading mRNA into EVs include active and passive encapsulation (X. Luan et al., Acta Pharmacol Sin 38, 754-763 (2017)). For example, Catalase mRNAs were loaded by incubation with macrophage derived EVs after sonication and extrusion, or permeabilization with saponin to treat Parkinson's disease (PD) (Haney et al., J Control Release 207, 18-30 (2015)). To treat leukemia, antisense oligonucleotides (ASOs), CRISPR-Cas9 mRNAs, and guide RNAs (gRNAs) were delivered into EVs originated from enucleated red blood cells (RBCs) by electroporation (W. M. Usman et al., Nat Commun 9, 2359 (2018)). EVs can also be engineered on the parent cell level, with genetic components being introduced to guide the production of designed EVs, often involving extreme overexpression of cargo components to achieve a sufficient loading dose. These procedures may either damage EVs leading to their aggregation or alter the physiology of the EV-producing donor cells, subsequently reducing cargo loading (X. Luan et al., Acta Pharmacol Sin 38, 754-763 (2017); F. Momen-Heravi, et al., Nanomedicine 10, 1517-1527 (2014); J. H. Wang et al., Mol Cancer Ther 17, 1133-1142 (2018)).

[0005] Available methods of delivering nucleic acids to cells have well characterized limitations. For example, AAV viral vectors often used for gene therapy are immunogenic, have a limited payload capacity of around 4.4 kb, suffer from poor bio-distribution, can only be administered by direct injection, and pose a risk of disrupting host genes by integration. Non-viral methods have different limitations. Liposomes are primarily delivered to the liver. Extracellular vesicles have limited scalability and purification difficulties. Thus, there is a recognized need for new methods of delivering therapeutic payloads.

[0006] Most molecules do not possess inherent affinity in the body. In other cases, the administered agents accumulate either in the liver and the kidney for clearance or in unintended tissue or cell types. Method for improving delivery includes coating the agent of choice with hydrophobic compounds or polymers. Such an approach increases the duration of said agent in circulation and augments hydrophobicity for cellular uptake. On the other hand, this approach does not actively direct cargo to the site of interest for delivery.

[0007] To specifically target sites where therapy is needed, therapeutic compounds are optionally fused to moieties such as ligands, antibodies, and aptamers that recognize and bind to receptors displayed on the surface of targeted cells. Upon reaching a cell of interest, the therapeutic compound is optionally further delivered to an intracellular target. For example, a therapeutic RNA can be translated to a protein if it comes into contact with a ribosome in the cytoplasm of the cell.

### SUMMARY

[0008] The present disclosure is directed to engineered extracellular vesicles, methods of making engineered extracellular vesicles, and methods of using engineered extracellular vesicles for delivering therapeutic compounds, biologics, or both to tissues and cells of interest.

[0009] In a first aspect, the present disclosure is directed to an RNA transcript composition comprising a cargo mRNA which comprises an Arc 5′UTR sequence. In some embodiments, the RNA transcript composition further comprises an Arc mRNA. In some embodiments, the Arc 5′UTR sequence comprises an Arc 5′UTR sequence from a mammal. In some embodiments, the Arc 5′UTR sequence comprises an Arc 5′UTR sequence selected from the group consisting of human, mouse, and rat. In some embodiments, the Arc 5′UTR sequence comprises an Arc 5′UTR sequence from drosophila. In some embodiments, the Arc 5′UTR sequence comprises an Arc 5′UTR sequence having at least 80% sequence identity, at least 85% sequence identity, at least 90% sequence identity, at least 95% sequence identity, at least 98% sequence identity, or at least 99% sequence identity to any one of SEQ ID NOS: 1-4. In some embodiments, the cargo mRNA further comprises a poly(A) signal. In some embodiments, the cargo mRNA encodes a therapeutic protein. In some embodiments, the cargo mRNA encodes a peptide, an enzyme, a cytokine, a hormone, a growth factor, an antigen, an antibody, a portion of an antibody, a clotting factor, a regulatory protein, a signaling protein, a transcription protein, and/or a receptor. In some embodiments, the cargo mRNA encodes a fluorescent protein, a bioluminescent protein, and/or a recombinase reporter. In some embodiments, the Arc mRNA comprises an Arc 3′UTR sequence. In some embodiments, the Arc mRNA comprises an Arc 3′UTR sequence from a mammal. In some embodiments, the mammal is human, mouse, or rat. In some embodiments, the Arc 3′UTR sequence comprises an Arc 3′UTR sequence from drosophila. In some embodiments, the Arc 3′UTR sequence comprises an Arc 3′UTR sequence having at least 80% sequence identity, at least 85% sequence identity, at least 90% sequence identity, at least 95% sequence identity, at least 98% sequence identity, or at least 99% sequence identity to any one of SEQ ID NOS: 5-8. In some embodiments, the Arc mRNA further comprises a poly(A) signal. In some embodiments, the Arc mRNA encodes an Arc protein from a mammal. In some embodiments, the mammal is human, mouse, or rat. In some embodiments, the Arc mRNA encodes an Arc protein from drosophila. In some embodiments, the Arc mRNA comprises an Arc mRNA sequence from a mammal. In some embodiments, the mammal is human, mouse, or rat. In some embodiments, the Arc mRNA comprises an Arc mRNA sequence from drosophila. In some embodiments, the Arc mRNA comprises a nucleotide sequence having at least 80% sequence identity, at least 85% sequence identity, at least 90% sequence identity, at least 95% sequence identity, at least 98% sequence identity, or at least 99% sequence identity to any one of SEQ ID NOS: 9-12.

[0010] Some aspects of the disclosure are directed to a recombinant system comprising a DNA encoding a cargo mRNA with an Arc 5′UTR sequence. In some embodiments the recombinant system comprising a DNA encoding a cargo mRNA with an Arc 5′UTR sequence further comprises a second DNA encoding an Arc mRNA. In some embodiments, the Arc 5′UTR sequence comprises an Arc 5′UTR sequence from a mammal. In some embodiments, the Arc 5′UTR sequence comprises an Arc 5′UTR sequence selected from the group consisting of human, mouse, and rat. In some embodiments, the Arc 5′UTR sequence comprises an Arc 5′UTR sequence from drosophila. In some embodiments, the Arc 5′UTR sequence comprises an Arc 5′UTR sequence having at least 80% sequence identity, at least 85% sequence identity, at least 90% sequence identity, at least 95% sequence identity, at least 98% sequence identity, or at least 99% sequence identity to any one of SEQ ID NOS: 1-4. In some embodiments, the cargo mRNA further comprises a poly(A) signal. In some embodiments, the cargo mRNA encodes a therapeutic protein. In some embodiments, the cargo mRNA encodes a peptide, an enzyme, a cytokine, a hormone, a growth factor, an antigen, an antibody, a portion of an antibody, a clotting factor, a regulatory protein, a signaling protein, a transcription protein, and/or a receptor. In some embodiments, the cargo mRNA encodes a fluorescent protein, a bioluminescent protein, and/or a recombinase reporter. In some embodiments, the Arc mRNA comprises an Arc 3′UTR sequence. In some embodiments, the Arc 3′UTR sequence comprises an Arc 3′UTR sequence is from a mammal. In some embodiments, the Arc 3′UTR sequence comprises an Arc 3′UTR sequence is selected from the group consisting of human, mouse, and rat. In some embodiments, the Arc 3′UTR sequence comprises an Arc 3′UTR sequence from drosophila. In some embodiments, the Arc 3′UTR sequence comprises an Arc 3′UTR sequence having at least 80% sequence identity, at least 85% sequence identity, at least 90% sequence identity, at least 95% sequence identity, at least 98% sequence identity, or at least 99% sequence identity to any one of SEQ ID NOS: 5-8. In some embodiments, the Arc mRNA further comprises a poly(A) signal. In some embodiments, the system comprises a single plasmid comprising the DNA encoding a cargo mRNA with an Arc 5′ UTR sequence and the second DNA encoding an Arc mRNA. In some embodiments, the system comprises a first plasmid comprising the DNA encoding a cargo mRNA with an Arc 5′ UTR sequence; and a second plasmid comprising the second DNA encoding an Arc mRNA. In some embodiments, the plasmid(s) further comprises a heterologous DNA regulatory element. In some embodiments, the heterologous DNA regulatory element comprises a promoter, an enhancer, a silencer, an insulator, or combinations thereof. In some embodiments, the Arc mRNA comprises an Arc sequence from a mammal. In some embodiments, the mammal is human, mouse, or rat. the Arc mRNA comprises an Arc sequence from drosophila. In some embodiments, the Arc 5′UTR sequence comprises a nucleotide sequence having at least 80% sequence identity, at least 85% sequence identity, at least 90% sequence identity, at least 95% sequence identity, at least 98% sequence identity, or at least 99% sequence identity to any one of SEQ ID NOS: 1-4. In some embodiments, the Arc mRNA encodes an Arc protein from a mammal. In some embodiments, the mammal is human, mouse, or rat. In some embodiments, the Arc mRNA encodes an Arc protein from drosophila. In some embodiments, the Arc mRNA comprises an Arc mRNA from a mammal. In some embodiments, the mammal is human, mouse, or rat. In some embodiments, the Arc mRNA comprises an Arc mRNA from drosophila. In some embodiments, the Arc mRNA comprises a nucleotide sequence having at least 80% sequence identity, at least 85% sequence identity, at least 90% sequence identity, at least 95% sequence identity, at least 98% sequence identity, or at least 99% sequence identity to any one of SEQ ID NOS: 9-12.

[0011] Certain aspects of the current disclosure are directed to an extracellular vesicle comprising an Arc protein; and a cargo mRNA comprising an Arc 5′UTR sequence. Some embodiments are directed to an extracellular vesicle comprising an Arc protein; and a cargo mRNA comprising an Arc 5′UTR sequence wherein the Arc 5′UTR sequence comprises an Arc 5′UTR sequence from a mammal. In some embodiments, the Arc 5′UTR sequence comprises an Arc 5′UTR sequence selected from the group consisting of human, mouse, and rat. In some embodiments, the Arc 5′UTR sequence comprises an Arc 5′UTR sequence from drosophila. In some embodiments, the Arc 5′UTR sequence comprises an Arc 5′UTR sequence having at least 80% sequence identity, at least 85% sequence identity, at least 90% sequence identity, at least 95% sequence identity, at least 98% sequence identity, or at least 99% sequence identity to any one of SEQ ID NOS: 1-4. In some embodiments, the cargo mRNA further comprises a poly(A) signal. In some embodiments, the cargo mRNA encodes a therapeutic protein. In some embodiments, the cargo mRNA encodes a peptide, an enzyme, a cytokine, a hormone, a growth factor, an antigen, an antibody, a portion of an antibody, a clotting factor, a regulatory protein, a signaling protein, a transcription protein, and/or a receptor. In some embodiments, the cargo mRNA encodes a fluorescent protein, a bioluminescent protein, and/or a recombinase reporter. In some embodiments, the Arc protein comprises an Arc protein sequence from a mammal. In some embodiments, the mammal is human, mouse, or rat. In some embodiments, the Arc protein comprises an Arc protein sequence from drosophila. In some embodiments, the Arc protein comprises at least 80% sequence identity, at least 85% sequence identity, at least 90% sequence identity, at least 95% sequence identity, at least 98% sequence identity, or at least 99% sequence identity to any one of SEQ ID NOS: 13-16. In some embodiments, the Arc mRNA comprises an Arc 3′UTR sequence. In some embodiments, the Arc 3′UTR sequence comprises an Arc 3′UTR sequence from a mammal. In some embodiments, the mammal is human, mouse, or rat. In some embodiments, the Arc 3′UTR sequence comprises an Arc 3′UTR sequence from drosophila. In some embodiments, the Arc 3′UTR sequence comprises an Arc 3′UTR sequence having at least 80% sequence identity, at least 85% sequence identity, at least 90% sequence identity, at least 95% sequence identity, at least 98% sequence identity, or at least 99% sequence identity to any one of SEQ ID NOS: 5-8. In some embodiments, the extracellular vesicle further comprises one or more small molecule drugs.

[0012] Another aspect of the current disclosure is a method for producing extracellular vesicles, the method comprising: (a) obtaining cells comprising an Arc mRNA and a cargo mRNA which comprises an Arc 5′ UTR; (b) growing the cells in a media under conditions to express an Arc protein encoded by the Arc mRNA, wherein the cells produce extracellular vesicles comprising the Arc protein and the cargo mRNA with the Arc 5′UTR sequence; and (c) isolating the extracellular vesicles from the media. In some embodiments of the method, the cells of step (a) are obtained by introducing into donor cells, a DNA construct which is transcribed into the Arc mRNA and a DNA construct which is transcribed into the cargo mRNA. In some embodiments of the method, the cells of step (a) are obtained by introducing into donor cells, the Arc mRNA and the cargo mRNA. In some embodiments, a recombinant construct is delivered in the form of DNA, RNA, or the combination of both. In some embodiments, the cell is a prokaryotic cell. In some embodiments, the cell is a eukaryotic cell. In some embodiments, the cell is a mammalian cell. In some embodiments, the cell is a human cell. In some embodiments, the donor cells are selected from neural cells, epithelial cells, endothelial cells, hematopoietic cells, connective tissue cells, muscle cells, bone cells, cartilage cells, germline cells, adipocytes, stem cells, self-derived ex vivo differentiated cells, iPSC-derived ex vivo differentiated cells, cancer cells, and combinations thereof. In some embodiments, the donor cells are leukocytes. In some embodiments, the donor cells are self-derived ex vivo differentiated leukocytes. In some embodiments, the donor cells are self-derived ex vivo differentiated monocytes, macrophages, dendritic cells, or combinations thereof. In some embodiments, the donor cells are iPSC-derived ex vivo differentiated leukocytes. In some embodiments, the donor cells are iPSC-derived ex vivo differentiated monocytes, macrophages, dendritic cells, or combinations thereof. In some embodiments, the cells comprising a nucleic acid construct are prepared by transfecting cells with a nucleic acid construct, wherein the transfection is carried out with polyethyleneimine (PEI) complexation, electroporation, cationic lipids complexation, lipid nanoparticle-mediated delivery, microinjection, and combinations thereof.

[0013] One aspect of the disclosure is directed to a method for delivering mRNA to a recipient cell, the method comprising: obtaining an extracellular vesicle as described; and contacting the recipient cell with the extracellular vesicle, wherein the extracellular vesicle fuses with the recipient cell, thereby delivering mRNA to the recipient cell. In some embodiments, the contacting is performed in vitro. In some embodiments, the contacting is performed in vivo. In some embodiments, the recipient cell is a mammalian cell. In some embodiments, the recipient cell comprises a hematopoietic cell, a non-hematopoietic cell, a stem cell, or combinations thereof. In some embodiments, the mRNA is delivered to a recipient cell to treat a disease, produce a protein, induce cell death, repress cell death, change cellular ageing, induce immune tolerance, modulate existing immune response, modify intracellular activity, modify cellular behavior, or combinations thereof.

[0014] Another aspect of the disclosure is directed to a method for treating a subject in need thereof comprising obtaining extracellular vesicles as described; and administering the extracellular vesicles to the subject. In some embodiments, the extracellular vesicles are administered orally, rectally, intravenously, intramuscularly, subcutaneously, intrauterinely, cerebrovascularly, or intraventricularly. In some embodiments, the extracellular vesicles comprise mRNAs of CRISPR-associated proteins and guide RNAs adapted for treatment of disease including a genetic disorder. Some embodiments are directed to the extracellular vesicles are administered to the subject for treatment of neurodegeneration diseases, aging related disorders, brain tumors, an inflammatory condition, delivering RNAs specifically into inflammatory brain tissues crossing the blood brain barrier without affecting the healthy cells. In some embodiments, the extracellular vesicles are adapted to deliver APOE4 RNA into the brain for the treatment of Alzheimer's disease. In some embodiments, the extracellular vesicles are administered for treatment of cancer, targeting tumor cells without affecting healthy tissues. In some embodiments, the extracellular vesicles comprise mRNA corresponding to tumor associated antigens and wherein the extracellular vesicles are delivered as cancer vaccines for the treatment of cancer, including melanoma, colon cancer, gastrointestinal cancer, genitourinary cancer, hepatocellular cancer. In some embodiments, the extracellular vesicles are delivered for the prevention and/or treatment of infectious diseases. In some embodiments, the extracellular vesicles are delivered for the treatment of autoimmune diseases.

[0015] Another aspect of the disclosure is directed to a method to deliver a construct to a recipient cell in vivo to produce an extracellular vesicle as described in vivo using an endogenous Arc. In some embodiments, the vesicle is produced by the endogenous Arc in vivo.

[0016] In some embodiments, the construct is delivered in the form of DNA and/or RNA. In some embodiments, the construct is delivered by a lipid nanoparticle, an exosome, a virus, and other gene delivery methods.

### BRIEF DESCRIPTION OF THE DRAWINGS

[0017] The patent or application file contains at least one drawing executed in color. Copies of this patent or patent application publication with color drawing(s) will be provided by the Office upon request and payment of the necessary fee.

[0018] FIGS. 1A-1J. Characterization of eaEV that loads and transfers mRNA. (A) The production of eaEV from donor cells and the transduction of eaEV into recipient cells. (B) Fluorescent NTA measures the concentration and size distribution of fluorescently labelled antiArc+ eaEVs among all light scattering EVs (the screen capture shown in C: red circle, eaEV; green circle, non-Arc EV). (D) Each particle's size is plotted as a function of its scattered intensity. (E) The NTA size distribution profile is represented as a histogram of particle concentrations. (F) The percentage of eaEVs in total EVs increased with Arc mRNA transfected, despite that total EV production was also promoted due to liposome transfection alone. (G) A representative NSEM image of eaEV with and without the outer membrane. (H) Fluorescence intensity of total EVs (CMDR+) and eaEVs (anti-Arc+) was measured to quantify their concentrations after purification. Numbers obtained from this fast and easy assay were then corelated to NTA results for the calculation of absolute particle numbers in each sample for future reference. (I) Confocal microscopy observed exosome release via multivesicular body (MVB) membrane fusion, direct outward budding and/or endocytosis of EVs in donor cell culture (blue pixels highlight Arc proteins in EVs whereas green pixels label A5U-GFP cargo mRNAs). (J) The overlap between GFP and CMDR in recipient cells: DAPI+/CMDR− cells without EV uptake showed no GFP signal.

[0019] FIGS. 2A-2Q. The addition of A5U significantly improved the efficiency of mRNA encapsulation into eaEV. (A) The 5′UTR of rat Arc shows higher similarity in predicted secondary structure with that of HIV1 than those of mouse and human Arc. The amount of Cy3-A5U-GFP mRNA or Cy5-GFP mRNA loaded into EVs was increased in the presence of Arc capsid, shown by fluorescence intensity reading of purified EVs (B and E), as well as real time epifluorescence imaging of the donor RAW264.7 cell culture (C-D and F-G). (H) RIP followed by RT-qPCR revealed that the addition of A5U increased mRNA loading into Arc capsids. (I-J) Optimization of the ratio of transfection reagents allows both efficient and selective loading of A5U-GFP cargo compared to 18S, GAPDH and rArc. The cargo A5U-GFP mRNA, capsid Arc mRNA, capsid Arc protein and nuclei in the recipient cells were stained and imaged, with a total number of 614 cells and 1611 EVs analyzed, with a representative area shown in (K) and magnified views in (L, M-O). Circles highlight Arc proteins indicating individual eaEV. With a ratio, Arc:A5U-GFP=1.5:1, almost all Arc (protein)+ EVs overlapped with A5U-GFP mRNAs (M-O, green & yellow), but none with Arc mRNAs (M-O, red). In addition to being loaded into Arc EVs, A5U-GFP and Arc mRNAs can also be seen in other EVs (L, red & yellow). GFP protein can be packed into EVs with an extremely low frequency compared to the mRNA cargo (L, M-O, purple). The percentage of colocalization between capsid protein and the GFP mRNA was quantified and compared to Arc mRNA (P-Q). No overlap between Arc protein and Arc mRNA was observed in extracellular vesicles.

[0020] FIGS. 3A-3G. The addition of A5U significantly improved the efficiency and stability of mRNA delivery into recipient cells. (A1-A2) Upon EV transduction, real-time live-cell imaging of Cy3 fluorescence was performed at 15-min (B1-B4), 1-hr, 4-hr (C1-C4), 3-day, 6-day and 12-day time points to quantify cargo mRNA up-taken by recipient cells. Transfer by eaEV carrying A5U-GFP showed a highly stable and drastic increase in the amount of cargo accumulated in recipient cells (A1), whereas Arc EV carrying cargo without the A5U appeared less stable and less efficient (A2). (D) First, CMDR (cell mask deep red) membrane dye was used to label total EVs, enabling fast and accurate quantification of total EVs in buffer as well as in recipient cells. Titration experiments suggested the best dye concentration of 1:5000, for moderate fluorescent signal with individual EVs visible in recipient cells. This dye concentration was then used to optimize the appropriate amount of EVs transferred to recipient cells, with a linear correlation demonstrated between CMDR signal and EV concentrations. (E) We added the same amount of EVs from each group to recipient cells, calculated with their CMDR fluorescence. After 2 hours, recipient cells receiving EVs from different groups showed similar levels of CMDR fluorescence, suggesting an uptake of similar numbers of total EVs. (F) Arc/A5U-GFP showed a consistent increase in cargo translation among control groups at 4 hours and 1 day after the EV transduction. On day 3, recipient cells started to show strong autofluorescence in control groups and the increase by Arc/A5U-GFP was no longer significant. (G) The percentage of recipient cells expressing GFP was low but significantly increased with Arc and A5UGFP.

[0021] FIGS. 4A-4J. A5U-eaEV enriches cargo mRNA in the aged brain. (A) BM cells are extracted from the mouse femur and cultured for 7 days in complete medium supplemented with GM-CSF and IL4 to differentiate into monocytes, dendritic cells, and macrophages, from which control and engineered EVs are produced and injected intravenously into mouse models for neuroinflammation. (B) Morphology of representative GM-CSF/IL4 BM cultures at day 6, bright filed image. (C) Phenotype of representative GM-CSF/IL4 BM cultures at day 6. CD11c+ MHCII+BMDCs (C, top left) can be sub-divided based on CD11b and MHCII expression (C, bottom). Boxes depict gates and numbers correspond to percentage of cells in each gate. Histograms showing surface expression of the indicated markers by MHCIIhighCD11blow and MHCIIintCD11bhigh subsets. (D) Day 6 GM-CSF/IL4 BM cells were able to uptake its own EVs labelled by CMDR. (E1-E4) After the transfection of mRNA transcripts, EVs were produced for 40 hours before collection and purification. This long production led to the saturation of EVs in the supernatant culture medium, yielding roughly an equal number of total EVs from each sample group (F). Meanwhile, the proportion of eaEV among total EVs is significantly higher in the Arc/A5U-GFP group. Purified EVs (1× and 2× dilutions) were stained with CMDR and a fluorescent Arc antibody, whose epifluorescence intensity was measured for EV concentrations. (G) Representative IVIS images show the in vivo biodistribution of Cy3+A5U-GFP mRNAs, which were significantly enriched in the aged brain with systemic administration by eaEVs, compared to the no Arc A5U-GFP only control. The photo overlay of radiance is displayed, with the color range from 3.3e+7 to 4.9e+8 and a color threshold at 3.5e+8, to subtract the background signal based on the negative control animals. In addition to representative images shown here, the mock transfection control, the PBS (no EV) injection control, and CMDR+ animals were also analyzed as the negative control for the Cy3 IVIS imaging here. (H) IVIS imaging of the in vivo biodistribution of Cy5+ GFP mRNA suggest that mRNA cargo does not enrich in the aged brain by eaEV delivery without the A5U motif added to the cargo construct. Like in (G), a color threshold of 3.5e+8 was applied to subtract the background signal based on the negative control animals (Cy3+Cy5− Arc/A5U-GFP and A5U-GFP groups). (I-J) Quantification of the IVIS signal. Mean+SD, n=2 for experimental groups; n=7 for NC groups. A sample size of 6 per group was used based on the power analysis with an 80% power, a 5% significance level, and a tow-sided t-test following Cohen's power analysis.

[0022] FIGS. 5A-5G. BM-DC/M derived A5U-eaEV can deliver mRNA into neurons across the BBB targeting chronic pan-neuronal inflammation. (A, A′, B, B′, where A′ and B′ are enlargements of A and B) A5U-GFP mRNA was successfully delivered across the BBB to express GFP proteins in the inflammatory aged brain: white pixels (GFP+/NeuN+) highlight colocalization between GFP and NeuN-Alexa647, representing neuronal GFP expression. In contrast, green pixels showed GFP in non-neuron cells, likely infiltrated immune cells. Magnified views of the hypothalamus are shown in (C-D). (E-F) Two days and even six days after the IV injection, aged brains showed a significant increase in the level of GFP expression in NeuN+ cells. Systemic injection of eaEV/A5U-GFP led to comparable levels of GFP expression in infiltrated peripheral immune cells cells (green pixels, C-E), but a significant enrichment in NeuN+ neurons in aged brains (white pixels, C-E). (G) The integrated expression of GFP among control and experimental groups in various brain regions. Certain brain regions, such as the arcuate hypothalamic nucleus (ARH), medial preoptic nucleus (MPN), ventral tegmental area (VTA), showed more significant increases than other regions including the hippocampus and the prefrontal cortex (PFC).

[0023] FIGS. 6A-6H. BM-DC/M derived A5U-eaEV can deliver mRNA into neurons across the BBB targeting acute ischemic stroke injury. In the acute ischemic stroke model (A), eaEV specifically delivered GFP into neurons in the stroke area (B-C) without affecting the control regions (B-C′). Magnified views (D-E) showed GFP expression in many NeuN+ neurons (white arrows) and a small number of Iba1+ microglia/macrophages, with further magnification in (F-G), which also showed many NeuN+ and Iba1+ cells without any GFP expression suggesting that the GFP signal observed is specific. There is clearly also GFP expression in NeuN−/Iba1− cells. (H) Compared to the control area, the number of NeuN+ neurons decreased in the stroke area, whereas that of Iba1+ immune cells increased (microglia and infiltrated macrophages). The number of GFP-expressing cells increased. All GFP+ cell count in the control area is non-specific background signal from autofluorescence in the microvessels.

[0024] FIGS. 7A-7E. Transfection of engineered DNA constructs and RNA transcripts into donor cells to test their functionality. (A) DNA constructs and RNA transcripts to encode the cargo have been verified in HEK293 and RAW 264.7 cells with a random mutation negative control, a distinct fluorophore mCherry control, and mock transfection controls, with live-cell epifluorescence imaging applied to monitor expression in real time lapse. (B) RAW264.7 donor cell expression at 8-hour post transfection. (C) RAW264.7 donor cell expression at 24-hour post transfection. (D-E) The number and viability of donor cells at the end of EV production was always recorded and compared to ensure a good and comparable quality of EVs produced among control and experimental groups.

[0025] FIGS. 8A-8C. Optimization of RNA transfection and EV production titrations with real-time live-cell imaging. (A) Shows real-time live-cell imaging of transfected donor cells at 6 doses of lipofectamine. (B) Graphs cell number in 96-well plate 4 hours post transfection. (C) compares cell number in a 6 well plate at 24 hours post transfection and 96 hours post transfection. The conclusion is that too much mRNA with not enough lipofectamine led to low viability of donor cells. Optimal dose was decided to be 100 ng total mRNA transfected per 20,000 donor cells (96-well, 100 μL total opti-MEM medium with 0.3 μL lipofectamine per well).

[0026] FIGS. 9A-9B. Optimization of the ratio between capsid and cargo mRNA transfection components. (A) Detailed optimization of the transfection ratio between capsid and cargo mRNAs was carried out in RAW264.7 cells. Lowest ratio of 0 Arc: 0 GFP is shown in A1 while ratio of 3:3 Arc:GFP is shown in (A16). (B) Graphically shows that with an increase in the amount of capsid Arc mRNA transfected, more cargo A5U-GFP mRNA was encapsulated instead of being translated, leading to decreased GFP protein expression. It was decided to not only focus on an amount of cargo mRNA leading to a high level of GFP expression when transfected alone, but also with the capsid mRNA introduced, a significant decrease in GFP expression compared to having the cargo alone. The decided ratio was 3 Arc: 2 A5U-GFP (or 1.5 Arc: 1 A5U-GFP) shown in A12.

[0027] FIG. 10. Visualization and optimization of RNA encapsulation. (A) real-time live-cell imaging of transfected cells using Cy3 and Cy5. (B) graphical representation of fluorescence intensity reading of RNA encapsulation.

[0028] FIG. 11. DNA transfection time lapse with quantification of GFP expression. With PEI-DNA transfection into HEK293 cells, since there is a stable source for continuing production of both capsid and cargo mRNAs and proteins, we observed a significant and stable increase in GFP expression transfecting both cargo and capsid. Eventually GFP expression in donor cells reached saturation (by 24 hours).

[0029] FIGS. 12A-12M. EV characterization and EV production optimization. (A-C) NTA results suggested that the production of total EVs was comparable among all transfected control and experimental groups. (K-M) More larger vesicles were produced with Arc transfection, likely being Arc ectosomes. (D-H) Adding the Arc capsid and A5U-GFP cargo enabled the most significant secretion of Arc EVs, compared to other control groups including Arc/GFP. (H) A large proportion of all EVs in Arc/A5U-GFP were Arc ectosomes. (I) Serum free production of EVs led to a higher-level secretion of mouse CD63+ EVs and a larger proportion of eaEVs among all EVs secreted. (J) EVs can be stored at 4° C. for a short period of time and then started aggregation.

[0030] FIG. 13. CMDR dye optimization to be used for the quantification of EV uptake. Staining with a plasma membrane stain, CMDR, was carried out to facilitate the quantification of EVs in recipient cells. The number of EVs to be transferred to recipient cells was also optimized.

[0031] FIGS. 14A-14B. Total EV (CMDR+) biodistribution at day 3 after IV injection. With the same total number of EVs injected into each control or experimental mouse (per kg body weight), the biodistribution of total EVs 3 days post IV injection (with EVs mostly degraded) was similar in all organs collected. Total EVs were labeled by a plasma membrane dye, CMDR.

[0032] FIG. 15A-15E. eaEV can deliver mRNA into the tumor. (A) In vivo biodistribution of CMDR+ total EVs in control and experimental groups: (1) no EV negative control (NC); (2) mock transfection (noTrans) EV control; (3) Arc negative EV carrying either GFP or A5U-GFP mRNAs; (4) Arc positive EV loaded with GFP or A5U-GFP mRNAs. Photo overlay of radiance was shown with a color range of 3.3e+07 to 5.0e+09 and a threshold at 3.5e+08. (B) Quantification of the CMDR biodistribution in mice injected with leukocyte eaEVs. (C) High resolution CLSM images showed high levels of GFP expression in the tumor but minimal expression in other organs. Whole-tumor imaging (D-E) with K-Ras staining (D1-E1) and a magnified view of regions deep into the tumor further away from the big vessels (D2-E3) suggest that eaEV facilitates deep tumor penetration and mRNA delivery.

[0033] FIG. 16. eaEV can load small molecule drugs into MB231 triple negative breast cancer cells. SM drug1 was loaded into the donor cells producing eaEVs at 1:500 concentration and such eaEVs were able to deliver this fluorescently labelled drug into recipient cells (top), whereas 1:50000 drug loaded was too diluted to transfer the drugs as a negative control (bottom).

[0034] FIG. 17 shows a map of an example DNA plasmid used to prepare the capsid for engineered EVs.

[0035] FIG. 18A-18B. The mechanism of selective cargo loading and the structure of an example carrier. (A) Arc 5′UTR enables the recognition of a specific cargo mRNA by the Arc capsid protein, while Arc 3′UTR accelerates nonsense-mediated mRNA decay of the Arc capsid mRNA after its translation. Altogether these allow the selective loading of cargo without the interference of overexpressed capsid mRNA. (B) An example structure of engineered EVs containing Arc protein capsids and nucleic acid cargos.

### DETAILED DESCRIPTION

[0036] Natural nanocarriers, extracellular vesicles (EVs), are a promising new class of drug carriers due to their biocompatible nature and endogenous functions that mediate long range intercellular exchange of molecules, along with a native ability to deliver to desired targets. Meanwhile, therapeutic messenger RNAs (mRNAs) have gained increasing interest in recent years. However, efficient and selective encapsulation of long mRNA into EVs remains problematic. Disclosed herein, the virus-like but retrotransposon Arc protein capsid is incorporated in the lumen of EV (“Arc EV”). Arc EV possesses high effectiveness like a viral vector and biocompatibility as a naturally occurring vesicle. Arc EV also plays native roles in loading and transferring mRNA inter-neuronally, making it a great tool for mRNA delivery into the brain, among other target tissues and cells of interest. The disclosed engineered Arc EV (eaEV) further enables highly efficient and stable encapsulation of specific mRNA cargo. Naturally equipped with donor cell's homing molecules for the neuroinflammatory microenvironment, leukocyte-derived eaEV facilitates efficient delivery of mRNA into disease neurons across the blood brain barrier. This disclosure provides a novel endogenous virus-like system capable of loading and delivering specific mRNA to target tissues and cells of interest.

[0037] Enabled by the incorporation of a virus-like protein capsid that binds to an RNA motif included in a cargo mRNA, engineered Arc EV has high mRNA cargo loading and transduction efficiency. Immunologically inert eaEV can be produced from various types of cells, including monocyte-derived cells, to deliver mRNA across the blood brain barrier (BBB), specifically targeting the neuroinflammatory microenvironment in vivo, which demonstrates the therapeutic potential of this nanoscale, biocompatible, and efficient mRNA drug carrier.

### Extracellular Vesicle

[0038] The terms “extracellular vesicle (EV)” or “vesicle” as used herein, refer to a cell-derived vesicle that is generated by a combination of endocytotic and exocytotic events that result in the encapsulation of various biomolecules. All prokaryotic and eukaryotic cells release EVs as part of their normal physiology and during acquired abnormalities. While EVs can be broadly divided into two categories, ectosomes and exosomes, the terms “ectosomes,” “exosomes,” and “EVs” may be used interchangeably for purposes of this disclosure. Ectosomes are vesicles that pinch off the surface of the plasma membrane via outward budding, and include microvesicles, microparticles, and large vesicles in the size range of ˜50 nm to 1 μm in diameter. Exosomes are EVs with a size range of ˜40 to 160 nm (average ˜100 nm) in diameter with an endosomal origin. Such encapsulation may protect a therapeutic nucleic acid from enzymatic degradation or other environmental stresses (e.g., ionic strength, pH etc.). The association of proteins with an EV provides stability in both extracellular and intracellular environments as well as facilitates a cell-targeting mechanism for cell-cell communication.

[0039] In some embodiments, EVs may be created in prokaryotes, eukaryotes, or viruses. In some embodiments, the engineered EVs are made in yeast, bacteria, virus, protists, or other types of cells, whether they be unicellular organisms or multicellular organisms, or non-living items which contain DNA.

[0040] Exosomes are produced by many different types of cells, including immune cells such as B lymphocytes, T lymphocytes, dendritic cells (DCs) and most cells. Exosomes are also produced, for example, by glioma cells, platelets, reticulocytes, neurons, intestinal epithelial cells and tumor cells. Exosomes for use in the disclosed compositions and methods can be derived from any suitable cell, including the cells identified above. Exosomes have also been isolated from physiological fluids, such as plasma, urine, amniotic fluid and malignant effusions. Non-limiting examples of suitable exosome producing cells for mass production include dendritic cells (e.g., immature dendritic cell), Human Embryonic Kidney 293 (HEK) cells, 293T cells, Chinese hamster ovary (CHO) cells, and human ESC-derived mesenchymal stem cells.

[0041] In some embodiments, exosomes are derived from DCs, such as immature DCs. Exosomes produced from immature DCs do not express MHC-II, MHC-I or CD86. As such, these exosomes do not stimulate naive T cells to a significant extent and are unable to induce a response in a mixed lymphocyte reaction allowing exosomes produced from immature dendritic cells to be good candidates for use in delivery of genetic material.

[0042] Exosomes can also be obtained from any autologous patient-derived, heterologous haplotype-matched or heterologous stem cells as to reduce or avoid the generation of an immune response in a patient to whom the exosomes are delivered. Any exosome-producing cell can be used for this purpose.

[0043] Exosomes produced from cells can be collected from the culture medium by any suitable method. Typically, a preparation of exosomes can be prepared from cell culture or tissue supernatant by centrifugation, filtration or combinations of these methods. For example, exosomes can be prepared by differential centrifugation, that is low speed (<20000 g) centrifugation to pellet larger particles followed by high speed (>100000 g) centrifugation to pellet exosomes, size filtration with appropriate filters (for example, 0.22 uin filter), gradient ultracentrifugation (for example, with sucrose gradient) or a combination of these methods.

[0044] The disclosed exosomes may be administered to a subject by any suitable means. Administration to a human or animal subject may be selected from parenteral, intramuscular, intracerebral, intravascular, subcutaneous, or transdermal administration. In some embodiments, the method of delivery is by injection. Preferably the injection is intramuscular or intravascular (e.g. intravenous). A physician will be able to determine the required route of administration for each patient in need of therapy.

[0045] The exosomes are preferably delivered as a composition. The composition may be formulated for parenteral, intramuscular, intracerebral, intravascular (including intravenous), subcutaneous, or transdermal administration. Compositions for parenteral administration may include sterile aqueous solutions which may also contain buffers, diluents and other suitable additives. The exosomes may be formulated in a pharmaceutical composition, which may include pharmaceutically acceptable carriers, thickeners, diluents, buffers, preservatives, and other pharmaceutically acceptable carriers or excipients and the like in addition to the exosomes.

[0046] In some embodiments of the current disclosure, the representative composition of the engineered EVs comprises cell membrane components (e.g., structural lipids and membrane proteins), Arc proteins or protein motifs (e.g., the MA or CA domains of Arc), enriched RNAs, and potentially other cargo components (e.g., proteins, RNAs, DNAs, nutrients, metabolites, and bioactive compounds). Engineered Arc EVs enrich desired cargo RNAs and minimize the packaging of unwanted cellular components.

[0047] Some embodiments of the current disclosure comprise an extracellular vesicle composition comprising an Arc protein and a cargo mRNA comprising an Arc 5′UTR sequence.

[0048] In some embodiments of the extracellular vesicle composition, the Arc protein binds to the Arc 5′UTR sequence of the cargo mRNA. The binding facilitates the packaging of the cargo mRNA into the exosomes. In some embodiments, the Arc 5′UTR sequence improves loading of the cargo mRNA into the EV with at least 25% improved loading. In some embodiments, the Arc 5′UTR sequence improves loading of the cargo mRNA into the EV with at least 50% improved loading. In some embodiments, the Arc 5′UTR sequence improves loading of the cargo mRNA into the EV with at least 75% improved loading. In some embodiments, the Arc 5′UTR sequence improves loading of the cargo mRNA into the EV with at least 1000% improved loading. In some embodiments, the Arc 5′UTR sequence improves loading of the cargo mRNA into the EV with at least 150% improved loading. In some embodiments, the Arc 5′UTR sequence improves loading of the cargo mRNA into the EV with at least 200% improved loading. In some embodiments, the Arc 5′UTR sequence improves loading of the cargo mRNA into the EV with at least 250% improved loading. In some embodiments, the Arc 5′UTR sequence improves RNA transduction into recipient cells. In some embodiments, the Arc 5′UTR sequence improves RNA transduction into recipient cells with at least 25% improved transduction over cargo mRNA without the Arc 5′UTR sequence. In some embodiments, the Arc 5′UTR sequence improves RNA transduction into recipient cells with at least 50% improved transduction. In some embodiments, the Arc 5′UTR sequence improves RNA transduction into recipient cells with at least 75% improved transduction. In some embodiments, the Arc 5′UTR sequence improves RNA transduction into recipient cells with at least 100% improved transduction. In some embodiments, the Arc 5′UTR sequence improves RNA transduction into recipient cells with at least 125% improved transduction. In some embodiments, the Arc 5′UTR sequence improves RNA transduction into recipient cells with at least 150% improved transduction.

[0049] In some embodiments, the EV composition further comprises one or more small molecules. In some embodiments, the EV is emersed in a drug solution comprising a desired small molecule. In some embodiments, the drug solution contains a desired small molecule at a predetermined concentration. The EVs then intake the small molecule in a passive transport process. In some embodiments, the small molecule is placed into the EV through physical means, such as sonication where the membrane of the EV is manipulated allowing the small molecule entry into the lumen of the EV.

[0050] By “small molecule,” it is meant a low molecular weight organic compound that may regulate a biological process. Small molecules typically have a molecular weight of at least 100 g/mol, 200 g/mol, or 500 g/mol, 1000 g/mol, 2000 g/mol, and up to 5,000 g/mol, 10,000 g/mol, 20,000 g/mol, 50,000 g/mol, or 100,000 g/mol (e.g., 100-50,000 g/mol, 100-10,000 g/mol). Many pharmaceuticals are small molecules and are called small molecule drugs. As used herein, small molecules and small molecule drugs can be used interchangeably.

[0051] Some examples of a small molecule are insulin, aspirin, and antihistamines. In some embodiments, small molecules include biological molecules such as fatty acids, glucose, amino acids, and cholesterol as well as secondary metabolites such as lipids, glycosides, alkaloids, and natural phenols. In some embodiments, small molecules are used to treat neurological diseases. In some embodiments, small molecules are used to treat autoimmune disorders. In some embodiments, small molecules are chemotherapeutic agents or anticancer drugs. In some embodiments, small molecules are inhibitors that target tyrosine kinase cell surface receptors or intracellular serine/threonine kinases involved in cellular signaling pathways such as the PI3K/Akt/mTOR signaling. In some embodiments, the small molecules are inhibitors which target apoptotic proteins, epigenetic regulators, and other proteins to deregulate cancer cell growth.

### Arc

[0052] Arc (activity-regulated cytoskeleton-associated protein) regulates the endocytic trafficking of a-amino-3-hydroxy-5-methylisoxazole-4-propionic acid (AMPA) type glutamate receptors. Arc activities have been linked to synaptic strength and neuronal plasticity. Phenotypes of loss of Arc in experimental murine model included defective formation of long-term memory and reduced neuronal activity and plasticity.

[0053] Arc exhibits similar molecular properties to retroviral Gag proteins. There appears to be a structural and functional relationship between Arc and retroviral Gag polyprotein. Arc was identified in a computational search for domesticated retrotransposons harboring Gag-like protein domains. Arc contains structural elements found within viral Group-specific antigen (Gag) polyproteins that may have originated from the Ty3/gypsy retrotransposon family (Campillos et al., Trends Genet. 22:585-589, 2006; Shepherd, Semin. Cell Dev. Biol. 77, 73-78, 2018; Zhang et al., Neuron 86, 490-500, 2015). Biochemical studies showed that mammalian Arc has a positively charged N-terminal domain (NTD) and a negatively charged C-terminal domain (CTD), separated by a flexible linker (Myrum et al., Biochem. J. 468, 2015). Crystal structure analysis of the isolated CTD revealed two lobes, both with striking 3D homology to the capsid (CA) domain of HIV Gag (Zhang et al., 2015). In retroviruses, self-association of CA allows assembly of Gag polyproteins into the immature capsid shell (Lingappa et al., Virus Res. 193, 89-107, 2014; Perilla and Gronenborn, Trends Biochem. Sci. 41, 410-420, 2016). Remarkably, recombinant Arc from fruit fly and rat was subsequently shown to self-assemble into spheroid particles with resemblance to HIV Gag capsids (Ashley et al., 2018; Pastuzyn et al., Cell 172, 275-288.e18, 2018). The Arc capsids are released in extracellular vesicles and capable of transmitting RNA cargo to recipient cells (Ashley et al., Cell 172, 262-274, 2018; Pastuzyn et al., 2018). These studies implicate Arc as an endogenous neuronal retrovirus, and oligomeric assembly of Arc into virus-like capsids mediates the capture and intercellular transfer of RNA (Parrish and Tomonaga, Cell 172, 8-10, 2018; Shepherd, 2018).

[0054] In some embodiments, Arc is a non-human Arc polypeptide. In some embodiments, the Arc polypeptide comprises a full-length Arc polypeptide (e.g., a full-length non-human Arc polypeptide). In other embodiments, the Arc polypeptide comprises a fragment of non-human Arc, such as a truncated Arc polypeptide, that participates in the formation of a capsid. In additional embodiments, the Arc polypeptide comprises one or more domains of a non-human Arc polypeptide, in which at least one of the domains participates in the formation of a capsid. In further embodiments, the Arc polypeptide is a recombinant Arc polypeptide.

[0055] In some embodiments, the Arc polypeptide is a human Arc polypeptide with at least its RNA binding domain modified to bind to a cargo that is not native to the human Arc. In some embodiments, the Arc polypeptide comprises a full-length human Arc polypeptide with at least its RNA binding domain modified to bind to a cargo that is not native to the human Arc protein. In other embodiments, the Arc polypeptide comprises a human Arc fragment comprising modification(s) in at least its RNA binding domain. In additional embodiments, the Arc polypeptide comprises one or more domains of a human Arc polypeptide, in which at least one of the domains participates in the formation of a capsid and in which the RNA binding domain is modified to bind to a cargo that native human Arc protein does not bind to. In further embodiments, the Arc polypeptide is a recombinant human Arc polypeptide, with at least the RNA binding domain is modified to enable loading of a cargo that is not native to the human Arc protein.

[0056] The various domains of Arc polypeptides have been described in the art. See, e.g., Pastuzyn et al., Cell 172, 275-288.e18, 2018 where highly conserved, unique orthologs of the murine Arc genes were identified throughout the tetrapods (mammals, birds, reptiles, amphibians) or Hallin et al., Biochemistry And Biophysics Reports, 26, 100975, 2021. For example, the domain of a human Arc polypeptide that participates in the formation of a capsid comprises amino acids 205-364 of a human Arc polypeptide, such as the human Arc polypeptide as reported in GenBank under Accession No. 23237 (SEQ ID NO: 13). Arc polypeptides from other species, such as mammalian species, can be utilized as well.

[0057] In some embodiments, the Arc polypeptide comprises an amino acid sequence that is at least 80% identical, at least 85% identical, at least 90% identical, at least 95% identical, at least 98% identical, or at least 99% identical, to SEQ ID NO: 13. In some embodiments, the Arc polypeptide comprises the amino acid sequence of SEQ ID NO: 13. In some embodiments, the Arc polypeptide comprises an amino acid sequence that is at least 80% identical, at least 85% identical, at least 90% identical, at least 95% identical, at least 98% identical, or at least 99% identical, to SEQ ID NO: 14. In some embodiments, the Arc polypeptide comprises the amino acid sequence of SEQ ID NO: 14. In some embodiments, the Arc polypeptide comprises an amino acid sequence that is at least 80% identical, at least 85% identical, at least 90% identical, at least 95% identical, at least 98% identical, or at least 99% identical, to SEQ ID NO: 15. In some embodiments, the Arc polypeptide comprises the amino acid sequence of SEQ ID NO: 15. In some embodiments, the Arc polypeptide comprises an amino acid sequence that is at least 80% identical, at least 85% identical, at least 90% identical, at least 95% identical, at least 98% identical, or at least 99% identical, to SEQ ID NO: 16. In some embodiments, the Arc polypeptide comprises the amino acid sequence of SEQ ID NO: 16.

### Arc Capsid

[0058] Arc monomers oligomerize into viral capsids. Arc spontaneously forms oligomeric structures that resemble virus-like capsids. Purified preparations of rat Arc capsids exhibited a double-shell structure with a mean diameter of 32±0.2 nm (Pastuzyn et al., Cell 172, 275-288 e218 (2018)). Similarly, bacterially-expressed and purified dArc1, a Drosophila Arc homologue, also self-assembled into capsid-like structures. Purified Arc protein that was expressed in an insect cell expression system also assembled into similar virus-like capsids, all of which shows that Arc oligomerization is not an artifact of bacterial expression. Immature retroviral capsids are formed by the uncleaved Gag polyprotein, and the major stabilizing interactions are made by the C-terminal domain (CTD) of the CA region (Mattei et al., Science 354, 1434-1437 (2016)). Drosophila homologs of Arc have shown viral like behavior, auto-assembling structures of the homologs closely matched that of HIV-1 and Ty3 capsids (Erlendsson et al., Nat Neurosci. 23, 172-175 (2020)). Consistent with other viral capsids, both drosophila Arc homologs formed pentamers and hexamers, which together framed the capsid shell. Also, the homologs formed protrusions on the surface of the capsid. (Budnik and Thomson, Nature Neuroscience.). Arc protein capsid naturally enriches mRNA into the lumen of EV, favoring the loading of mRNAs over other cellular components such as DNA, proteins, metabolic waste etc. Arc protein oligomerizes to form a capsid encapsulating Arc mRNAs. In the absence of endogenous Arc mRNA, Arc protein capsid could package and transfer other abundant RNAs (Pastuzyn et al., Cell 172, 275-288 e218 (2018)).

Arc mRNA

[0059] By an “Arc mRNA” it is meant an mRNA coding for an Arc polypeptide as described herein. In some embodiments, the Arc mRNA comprises a 5′ untranslated region (UTR) that is an Arc 5 ‘UTR. In some embodiments the Arc mRNA comprises a 3′UTR that is an Arc 3’ UTR. In some embodiments, the Arc mRNA is chimeric in that it comprises an Arc 5′ UTR, Arc mRNA coding sequence that encodes an Arc polypeptide, and an Arc 3′UTR where two or all of the three sequences are heterologous, i.e., from different species. In some embodiments, the Arc mRNA comprises an Arc 5′ UTR, Arc mRNA coding sequence that encodes an Arc polypeptide, and an Arc 3′UTR that are all from the same species.

[0060] In some embodiments, the Arc mRNA does not comprise a 5′UTR such as an Arc 5′ UTR. In some embodiments, an Arc mRNA includes a 5′ UTR. In some embodiments, an Arc mRNA comprises a 5′UTR that is not an Arc 5′ UTR. In some embodiments, an Arc mRNA does not comprise a 5′ UTR.

[0061] In some embodiments, an Arc mRNA does not comprise a 3′UTR such as an Arc 3′ UTR. In some embodiments, an Arc mRNA comprises a 3′UTR such as an Arc 3′ UTR. In some embodiments, an Arc mRNA comprises a 3′UTR that is not an Arc 3′UTR sequence. In some embodiments, an Arc mRNA does not comprise a 3′ UTR.

[0062] In some embodiments, the Arc mRNA is an mRNA encoding an Arc polypeptide from a mammal. In some embodiments, the Arc mRNA is an mRNA encoding a human Arc polypeptide. In some embodiments, the Arc mRNA is an mRNA encoding a non-human Arc polypeptide. In some embodiments, the Arc mRNA is an mRNA encoding a mouse Arc polypeptide. In some embodiments, the Arc mRNA is an mRNA encoding a rat Arc polypeptide.

[0063] In some embodiments, an Arc mRNA is an mRNA encoding an Arc polypeptide from a non-mammal. In some embodiments, the Arc mRNA is an mRNA encoding a drosophila Arc polypeptide.

[0064] In some embodiments, the Arc mRNA comprises a sequence that is at least 80% identical, at least 85% identical, at least 90% identical, at least 95% identical, at least 98% identical, or at least 99% identical to SEQ ID NO: 9. In some embodiments, the Arc mRNA comprises nucleic acid SEQ ID NO: 9. In some embodiments, the Arc mRNA comprises a sequence that is at least 80% identical, at least 85% identical, at least 90% identical, at least 95% identical, at least 98% identical, or at least 99% identical to SEQ ID NO: 10. In some embodiments, the Arc mRNA comprises nucleic acid SEQ ID NO: 10. In some embodiments, the Arc mRNA comprises a sequence that is at least 80% identical, at least 85% identical, at least 90% identical, at least 95% identical, at least 98% identical, or at least 99% identical to SEQ ID NO: 11. In some embodiments, the Arc mRNA comprises nucleic acid SEQ ID NO: 11. In some embodiments, the Arc mRNA comprises a sequence that is at least 80% identical, at least 85% identical, at least 90% identical, at least 95% identical, at least 98% identical, or at least 99% identical to SEQ ID NO: 12. In some embodiments, the Arc mRNA comprises nucleic acid SEQ ID NO: 12.

[0065] In some embodiments, the Arc mRNA comprises a poly(adenylation) signal.

[0066] In some embodiments, the Arc mRNA comprises an Arc 3′UTR sequence.

### Arc 5′UTR

[0067] Arc and Gag were reported to show little specificity for a particular mRNA in vitro without their 5′ untranslated region (UTR) (Ashley et al., Cell 172, 262-274 e211 (2018); Comas-Garcia, et al., Viruses 8, (2016).). “Arc 5′UTR (A5U)” as used herein means a 5′UTR of a naturally occurring Arc mRNA. This is a region that is not translated into a protein.

[0068] As described above, in some embodiments, the 5′UTR is optional for an Arc mRNA. For example, in some embodiments, an Arc mRNA includes a 5′ UTR; in other embodiments, an Arc mRNA does not comprise a 5′ UTR; in other embodiments, an Arc mRNA comprises a 5′UTR that is not an Arc 5′ UTR; and in other embodiments, an Arc mRNA does not comprise a 5′UTR at all.

[0069] In embodiments where an Arc mRNA comprises an A5U, the A5U is an A5U sequence from a mammal. In further embodiments, the A5U is from a human. In other embodiments, the A5U is from mouse. In other embodiments, the A5U is from rat. In some embodiments, the A5U is from drosophila.

[0070] In some embodiments, an A5U is added to the cargo construct. The addition of an A5U to the cargo construct enabled high cargo loading efficacy. 3′UTR

[0071] In some embodiments, the Arc 5′UTR comprises a sequence that is at least 80% identical, at least 85% identical, at least 90% identical, at least 95% identical, at least 98% identical, or at least 99% identical, to SEQ ID NO: 1. In some embodiments, the Arc 5′UTR comprises SEQ ID NO: 1. In some embodiments, the Arc 5′UTR comprises a sequence that is at least 80% identical, at least 85% identical, at least 90% identical, at least 95% identical, at least 98% identical, or at least 99% identical, to SEQ ID NO: 2. In some embodiments, the Arc 5′UTR comprises SEQ ID NO: 2. In some embodiments, the Arc 5′UTR comprises a sequence that is at least 80% identical, at least 85% identical, at least 90% identical, at least 95% identical, at least 98% identical, or at least 99% identical, to SEQ ID NO: 3. In some embodiments, the Arc 5′UTR comprises SEQ ID NO: 3. In some embodiments, the Arc 5′UTR comprises a sequence that is at least 80% identical, at least 85% identical, at least 90% identical, at least 95% identical, at least 98% identical, or at least 99% identical, to SEQ ID NO: 4. In some embodiments, the Arc 5′UTR comprises SEQ ID NO: 4.

### Arc 3′ UTR

[0072] The term “3′ UTR sequence” as used herein, refers to an mRNA-derived 3′ untranslated repeat sequence that is capable of binding to a protein within an extracellular vesicle. For example, an Arc 3 ‘UTR sequence may bind to an Arc protein within an extracellular vesicle. Such 3’ UTR binding to a protein may occur with only the 3′ UTR sequence, or when the 3′ UTR sequence is linked to a non-Arc nucleic acid.

[0073] In some embodiments, an Arc mRNA does not comprise a 3′UTR sequence. In other embodiments, an Arc mRNA includes a 3′UTR sequence. In other embodiments, an Arc mRNA includes a 3′UTR sequence that is an Arc 3′UTR sequence. In some embodiments, an Arc mRNA comprises a 3′UTR that is not an Arc 3′UTR sequence.

[0074] In some embodiments of the present disclosure, modifications of the capsid Arc gene are presented to enable the fast clearance of Arc mRNAs after they are translated into proteins. In some embodiments, such modification is achieved by the addition of a rat Arc 3′UTR sequences (A3U, partial or full) using various molecular cloning techniques. An Arc 3′UTR can be from human, mouse, rat (NCBI Gene IDs #23237, #11838, #54323) or drosophila (dArc1, NCBI Gene ID #36595). These embodiments provide the map of an exemplary DNA plasmid cloned to generate an exemplary capsid for engineered EVs (FIG. 17). Fast removal of the Arc mRNA after translation avoids overexpression of Arc in target cells without compromising the production of the carrier (FIG. 18A). The disclosure further includes the addition of A3U sequences to a sequence encoding the full-length Arc protein, Arc protein motifs, and any codon optimized sequences of these motifs from all species. Arc mRNA sequences with and without an A3U sequence are both included in the present disclosure.

[0075] In some embodiments, the Arc 3′UTR is mammalian. In further embodiments, the Arc 3′UTR is human. In other embodiments, the Arc 3′UTR is from mouse. In other embodiments, the Arc 3′UTR is from rat. In some embodiments, the Arc 3′UTR is not mammalian. In further embodiments, the Arc 3′UTR is from drosophila.

[0076] In some embodiments, the Arc 3′UTR comprises a nucleic acid sequence that is at least 80% identical, at least 85% identical, at least 90% identical, at least 95% identical, at least 98% identical, or at least 99% identical, to SEQ ID NO: 5. In some embodiments, the Arc 3′UTR mRNA comprises SEQ ID NO: 5. In some embodiments, the Arc 3′UTR comprises a sequence that is at least 80% identical, at least 85% identical, at least 90% identical, at least 95% identical, at least 98% identical, or at least 99% identical, to SEQ ID NO: 6. In some embodiments, the Arc 3′UTR comprises SEQ ID NO: 6. In some embodiments, the Arc 3′UTR comprises a sequence that is at least 80% identical, at least 85% identical, at least 90% identical, at least 95% identical, at least 98% identical, or at least 99% identical, to SEQ ID NO: 7. In some embodiments, the 3′ Arc UTR comprises SEQ ID NO: 7. In some embodiments, the Arc 3′UTR comprises a sequence that is at least 80% identical, at least 85% identical, at least 90% identical, at least 95% identical, at least 98% identical, or at least 99% identical, to SEQ ID NO: 8. In some embodiments, the Arc 3′UTR comprises SEQ ID NO: 8.

### Cargo

[0077] In some embodiments, a composition of the disclosure (for example, an arc EV) comprises a cargo. In some embodiments, the Arc EVs comprise a cargo mRNA. As used herein, the term “cargo mRNA” refers to any nucleic acid that is not a portion of, or transcribed from, the arc gene. In some embodiments, the cargo mRNA encodes a therapeutic protein. In some embodiments, the cargo mRNA encodes a peptide, an enzyme, a cytokine, a hormone, a growth factor, an antigen, an antibody, a portion of an antibody, a clotting factor, a regulatory protein, a signaling protein, a transcription protein, and/or a receptor. In some embodiments, the cargo mRNA encodes a reporter protein. In some embodiments, the cargo mRNA encodes a fluorescent protein, a bioluminescent protein, and/or a recombinase reporter. In some embodiments, the cargo mRNA comprises a combination of a therapeutic protein and a reporter protein.

[0078] In some embodiments, a cargo mRNA comprises an Arc 5′ UTR. In such embodiments, the cargo mRNA and the Arc 5′UTR sequences are designed so that the sequence is one contiguous sequence starting with an upstream Arc 5′UTR followed by the coding portion of the cargo mRNA sequence for a desired protein. In some embodiments, the cargo mRNA is a chimeric mRNA where its only 5′UTR is an Arc 5′UTR and its coding portion is a non-Arc coding portion.

[0079] In some embodiments, the cargo mRNA does not comprise a 3′UTR sequence. In some embodiments, the cargo mRNA comprises a 3′UTR sequence that is not an Arc 3′UTR sequence. In some embodiments, the cargo mRNA comprises a 3′UTR sequence. In some embodiments, the cargo mRNA comprises a 3′UTR sequence that is an Arc 3′UTR sequence.

[0080] In some embodiments, the nucleic acid molecule is an RNA polymer, e.g., a single stranded RNA polymer, a double stranded RNA polymer, or a hybrid of single and double stranded RNA polymers. In some embodiments, the RNA comprises and/or encodes an antisense oligoribonucleotide, a siRNA, an mRNA, a tRNA, an rRNA, a snRNA, a shRNA, microRNA, or a non-coding RNA.

[0081] In some embodiments, the nucleic acid molecule comprises a hybrid of DNA and RNA.

[0082] In some embodiments, the nucleic acid molecule is an antisense oligonucleotide, optionally comprising DNA, RNA, or a hybrid of DNA and RNA.

[0083] In some embodiments, the nucleic acid molecule comprises and/or encodes an RNAi molecule. In some embodiments, the RNAi molecule is a microRNA (miRNA) molecule. In other embodiments, the RNAi molecule is an siRNA molecule. The miRNA and/or siRNA are optionally double-stranded or as a hairpin, and further optionally encapsulated as precursor molecules.

[0084] In some embodiments, the nucleic acid molecule is for use in a nucleic acid-based therapy. In some embodiments, the nucleic acid molecule is for regulating gene expression (e.g., modulating mRNA translation or degradation), modulating RNA splicing, or RNA interference. In some cases, the nucleic acid molecule comprises and/or encodes an antisense oligonucleotide, microRNA molecule, siRNA molecule, mRNA molecule, for use in regulation of gene expression, modulating RNA splicing, or RNA interference.

[0085] In some embodiments, the nucleic acid molecule is for use in gene editing. Exemplary gene editing systems include, but are not limited to, CRISPR-Cas systems, zinc finger nuclease (ZFN) systems, and transcription activator-like effector nuclease (TALEN) systems. In some embodiments, the nucleic acid molecule comprises and/or encodes a component involved in the CRISPR-Cas systems, ZFN systems, or the TALEN systems.

[0086] In some embodiments, the cargo is a therapeutic agent. In some embodiments, the cargo is a small molecule, a protein, a peptide, an antibody or binding fragment thereof, a peptidomimetic, or a nucleotidomimetic. In some embodiments, the cargo is a therapeutic cargo, comprising e.g., one or more drugs. In some embodiments, the cargo comprises a diagnostic tool, for profiling, e.g., one or more markers (such as markers associates with one or more disease phenotypes). In additional embodiments, the cargo comprises an imaging tool.

[0087] In some embodiments, the nucleic acid molecule is for use in antigen production for therapeutic and/or prophylactic vaccine production. For example, the nucleic acid molecule encodes an antigen that is expressed and elicits a desirable immune response (e.g., a pro-inflammatory immune response, an anti-inflammatory immune response, an B cell response, an antibody response, a T cell response, a CD4+ T cell response, a CD8+ T cell response, a Th1 immune response, a Th2 immune response, a Th17 immune response, a Treg immune response, or a combination thereof).

[0088] In some embodiments, the nucleic acid molecule comprises a nucleic acid enzyme.

[0089] Nucleic acid enzymes are RNA molecules (e.g., ribozymes) or DNA molecules (e.g., deoxyribozymes) that have catalytic activities. In some embodiments, the nucleic acid molecule is a ribozyme. In other embodiments, the nucleic acid molecule is a deoxyribozyme. In some cases, the nucleic acid molecule is a MNAzyme, which functions as a biosensor and/or a molecular switch (see, e.g., Mokany, et al., JACS 132(2): 1051-1059 (2010)). Some embodiments of the current disclosure comprise an RNA transcript composition comprising an Arc mRNA as well as a cargo mRNA with an Arc 5′UTR sequence.

### Vectors

[0090] Some embodiments of the current disclosure comprise a recombinant system comprising a first DNA encoding an Arc mRNA and a second DNA encoding a cargo mRNA with an Arc 5′UTR sequence. In some embodiments, the recombinant system comprises a single construct comprising the first DNA and second DNA. In some embodiments, the recombinant system comprises a first construct comprising the first DNA and a second construct comprising the second DNA. In some embodiments, the constructs further comprise a heterologous DNA regulatory element, where a “DNA regulatory element” a DNA sequence that certain transcription factors recognize and bind to in order to recruit or repel RNA polymerase. In further embodiments, the heterologous DNA regulatory element comprises a promoter, an enhancer, a silencer, an insulator, or combinations thereof.

[0091] Each of the first nucleic acid sequence and the second nucleic acid sequence can be operably inserted into an expression vector. In some embodiments, the first nucleic acid sequence and second nucleic acid sequence are operably inserted in a common expression vector and they are expressed together. For example, in some embodiments, the second nucleic acid encoding the chimeric polynucleotide is inserted in frame into an intron of the first nucleic acid encoding the Arc protein. Methods to construct expression vectors containing genetic sequences and appropriate transcriptional and translational control elements are well known in the art. These methods include in vitro recombinant DNA techniques, synthetic techniques, and in vivo genetic recombination. Such techniques are described in Sambrook et al., Molecular Cloning, A Laboratory Manual (Cold Spring Harbor Press, Plainview, N.Y., 1989), and Ausubel et al, Current Protocols in Molecular Biology (John Wiley & Sons, New York, N.Y., 1989).

[0092] Vectors include but are not limited to plasmids, viral nucleic acids, viruses, phage nucleic acids, phages, cosmids, and artificial chromosomes. Expression vectors generally contain regulatory sequences necessary elements for the translation and/or transcription of the inserted coding sequence. For example, the coding sequence is preferably operably linked to a promoter and/or enhancer to help control the expression of the desired gene product. Promoters used in biotechnology are of different types according to the intended type of control of gene expression. They can be generally divided into constitutive promoters, tissue-specific or development-stage-specific promoters, inducible promoters, and synthetic promoters.

[0093] Depending on the vector system and the host utilized, any number of suitable transcription and translation elements may be used. In mammalian cell systems, promoters from mammalian genes or from mammalian viruses are preferable.

### Methods of Making Arc Extracellular Vesicles

[0094] Some embodiments of the current disclosure comprise a method of making EVs comprising obtaining cells comprising an Arc mRNA and a cargo mRNA which comprises an Arc 5′ UTR; growing the cells in a media under conditions to express an Arc protein encoded by the Arc mRNA, wherein the cells produce extracellular vesicles comprising the Arc protein and the cargo mRNA with the Arc 5′UTR sequence; and isolating the extracellular vesicles from the media. In some embodiments, the method of making EVs comprises obtaining cells comprising obtaining cells comprising an Arc mRNA and a cargo mRNA which comprises an Arc 5′ UTR, by introducing into donor cells, a DNA construct which is transcribed into the Arc mRNA and a DNA construct which is transcribed into the cargo mRNA. In some embodiments, the method of making EVs comprises obtaining cells comprising obtaining cells comprising an Arc mRNA and a cargo mRNA which comprises an Arc 5′ UTR, by introducing into donor cells, by introducing into donor cells, the Arc mRNA and the cargo mRNA.

[0095] “Donor cells” as used herein is a term of art. The donor cells function in that the construct is inserted into the donor cell, and the cell produces the EV. For example, when the Arc mRNA and the cargo mRNA comprising an Arc 5′UTR are inserted into the donor cell, by methods known and described below, the donor cell translates the Arc mRNA to synthesize the Arc polypeptide. The Arc polypeptide then forms the EV through its retrovirus like budding mechanism—much like the retrovirus like budding mechanism of Gag. Since all cells make EVs, all cells can be donor cells.

[0096] In some embodiments, EVs are created in prokaryotes, eukaryotes, or viruses. In some embodiments, the engineered EVs are made in yeasts, bacteria, viruses, protists, or other types of cells, whether they be unicellular organisms, multicellular organisms, or non-living items which contain DNA.

[0097] The donor cells may provide the EV with its targeting specificity. This is due to the native ability of EVs from different donor cell types in targeting various tissues.

[0098] In some embodiments, the method of making EVs further comprises donor cells that are selected from neural cells, epithelial cells, endothelial cells, hematopoietic cells, connective tissue cells, muscle cells, bone cells, cartilage cells, germline cells, adipocytes, stem cells, self-derived ex vivo differentiated cells, iPSC-derived ex vivo differentiated cells, cancer cells, and combinations thereof. In further embodiments, the donor cells are leukocytes. In some embodiments, the donor cells are self-derived ex vivo differentiated leukocytes. In some embodiments, the donor cells are self-derived ex vivo differentiated monocytes, macrophages, dendritic cells, or combinations thereof. In some embodiments, the donor cells are iPSC-derived ex vivo differentiated leukocytes. In some embodiments, the donor cells are iPSC-derived ex vivo differentiated monocytes, macrophages, dendritic cells, or combinations thereof.

[0099] Creating the donor cells occurs through the placing of the two nucleic acids, the Arc mRNA and the cargo mRNA attached to the A5U, into the donor cell. This placing can be done through methods known in the art, including, but not limited to, physical methods such as direct micro injection, biolistic particle delivery, electroporation, sonoporation, and laser-based optical transfection; and chemical methods, such as calcium phosphate, cationic polymer, lipofection, fugene, or dendrimer transfection. In some embodiments, the transfer of nucleic acids into to the donor cells takes place through polyethyleneimine (PEI) complexation, electroporation, cationic lipids complexation, lipid nanoparticle-mediated delivery, microinjection, or through the use of adenoviral vectors. While the cargo mRNA does not need to be attached to the A5U, RNA transduction into recipient cells is less efficient and less stable without the A5U included as is seen in FIG. 3A2.

### Applications

[0100] Some aspects of the current disclosure include a method for delivering mRNA to a recipient cell. In some embodiments, the method comprises obtaining an extracellular vesicle as described herein and contacting the extracellular vesicle with a recipient cell, wherein the extracellular vesicle fuses with the cell, thereby delivering the desired mRNA to the recipient targeted cell. In some embodiments, the method of delivering mRNA to the recipient cell is performed in vitro. In some embodiments, the method of delivering mRNA to the recipient cell is performed in vivo as described below.

[0101] In some embodiments of the current disclosure, the mRNA is delivered to a recipient cell to treat a disease, produce a protein, induce cell death, repress cell death, change cellular ageing, induce immune tolerance, modulate existing immune response, modify intracellular activity, modify cellular behavior, or combinations thereof.

[0102] The eaEV of the present disclosure can be applied in a wide range of therapeutics. In some embodiments, the EVs are used for the treatment for cancer. In some embodiments, the EVs are used to prevent and/or treat viral infection. In some embodiments, the EVs are used in the treatment and/or prevention of allergies. In some embodiments, the EVs are used to treat tissue degeneration. In some embodiments, the EVs are used to treat inflammatory diseases. For example, EVs from peripheral immune cells can cross the blood brain barrier under inflammatory conditions to deliver drugs into disease cells without affecting healthy tissues. Such EVs can also deliver drugs preferably into inflammatory microenvironments. In further embodiments, the EVs deliver the therapeutic to tumor inflammatory microenvironments. In some embodiments, the target of such EVs include virally infected tissues for the treatment of virus infection. In other embodiments, the EVs include cargo mRNA that can be used for gene therapy.

[0103] Some aspects of the current disclosure include methods for treating a subject with extracellular vesicles. In some embodiments, the method for treating a subject with EVs comprises obtaining EVs and administering to a subject in need thereof. In some embodiments, the EVs are administered orally, rectally, intravenously, intramuscularly, subcutaneously, intrauterinely, cerebrovascularly, or intraventricularly. In some embodiments, the EVs comprise mRNAs of CRISPR-associated proteins and guide RNAs adapted for treatment of disease including a genetic disorder. In some embodiments, the extracellular vesicles are administered for treatment of neurodegeneration diseases, aging related disorders, brain tumors, inflammatory conditions, delivering RNAs specifically into inflammatory brain tissues crossing the blood brain barrier without affecting the healthy cells. In some embodiments, the EVs comprise mRNA corresponding to tumor associated antigens and wherein the extracellular vesicles are delivered as cancer vaccines for the treatment of cancer, including melanoma, colon cancer, gastrointestinal cancer, genitourinary cancer, hepatocellular cancer. In some embodiments, the EVs are delivered to prevent contraction of infectious disease, i.e. vaccination. In some embodiments, the EVs are delivered for the treatment of autoimmune diseases. A non-limiting example of treatment of an autoimmune disease is to deliver the mRNA of interleukin-1 receptor antagonist (IL-1ra), or the recombinant version, anakinra, for the treatment of rheumatoid arthritis, an autoimmune disease in which IL-1 plays a key role.

[0104] Another aspect of the current disclosure is a method to deliver the construct of the cargo linked to the A5U to a donor cell in vivo to produce an EV in vivo using endogenous Arc protein. In some embodiments, the construct is delivered as DNA. In some embodiments, the construct is delivered as RNA. In some embodiments, the construct is delivered to the donor cell by a lipid nanoparticle, an exosome, a virus, or another gene delivery method.

### EXAMPLES

[0105] The following examples are presented to illustrate the present disclosure. The examples are not intended to be limiting in any manner.

### Example 1. Engineering, Production, and Isolation of eaEV to Load and Deliver mRNA

[0106] Arc vesicles were engineered, produced, isolated, and characterized, to verify their ability to deliver mRNA in vitro (FIG. 1A). Two components of this carrier system are the mRNA cargo and the Arc protein capsid, which can be introduced to virtually all donor cell types to produce enveloped eaEV with different homing/targeting capacity for various applications. The cargo construct was engineered for efficient mRNA encapsulation where the A5U sequence was added upstream of the cargo mRNA sequence (FIG. 1A).

[0107] Rat Arc capsid was used for characterization since it can be distinguished from endogenous Arc in human/mouse cell lines as well as in vivo mouse models. To produce the engineered Arc EV (eaEV), mRNA encoding the Arc capsid and cargo GFP mRNA was delivered into human embryonic kidney (HEK293) and mouse macrophage (RAW264.7) cells (FIG. 1A). Extensive and comprehensive titration and time lapse experiments were carried out to optimize EV production (FIG. 7-FIG. 11). A variety of transfection methods were tested, including electroporation of DNA/RNA, PEI-DNA transfection (FIG. 7 & FIG. 10), and liposome-RNA transfection (FIG. 8-FIG. 10). The doses of transfection reagents were carefully titrated to ensure uncompromised donor cell viability post transfection (FIG. 7, FIG. 8), the ratio of capsid/cargo constructs to maximize mRNA encapsulation without introducing excessive capsid mRNA (FIG. 9), the time lapse of mRNA loading and cargo expression in donor/recipient cells to maximize EV collection efficiency (FIG. 11). Finally, we used liposome mediated RNA transfection was used to deliver 12 pmol Arc (4.63 μg), 8 pmol GFP (1.86 μg) and 8 pmol A5U-GFP (2.26 μg) mRNAs per one million donor cells, to produce control EVs and eaEVs for 8-40 hours in serum free culture medium. Isolated from the supernatant culture medium by ultrafiltration, the eaEV subpopulation was labeled by a fluorescent Arc antibody to be characterized via fluorescent nanoparticle tracking analysis (NTA), whereas total EVs were measured by light scattering from all particles (FIG. 1B-C and FIG. 12A-C). A general EV marker antibody (anti-CD63) and plasma membrane stains (CellMask) were also used to label total EVs. The Arc+ EV subpopulation appeared larger than Arc− vesicles (FIG. 1D and FIG. 12A′-C′). The addition of rat Arc mRNA increased Arc+ EVs by 6.5 fold, suggesting an efficient production of eaEVs (FIG. 1E-F).

[0108] Next, eaEV and the Arc capsid were examined by negative stain electron microscopy (NSEM, FIG. 1G), to further characterize their size and morphology. The fluorescence intensity of labeled eaEVs and total EVs was measured and corelated to the NTA results with coefficients calculated (FIG. 1H and Table S1). With these, a measurement of fluorescence intensity was used to calculate the absolute particle concentration of eaEVs among total EVs, using a fluorescent intensity reader. This confirmed the morphology, size distribution, production efficiency, and sufficient purity of collected eaEVs.

[0109] To visualize the secretion and transfer of individual eaEV, the Arc capsid protein and cargo mRNA were labelled by immunocytochemistry (ICC) and fluorescence in situ hybridization (FISH) with quantitative hybridization chain reaction (qHCR) followed by confocal laser scanning microscopy (CLSM) (FIG. 11). In addition to extracellular Arc+/GFP+ eaEVs, their outward budding (also possibly endocytosis) was often observed, whereas the release of cargo containing Arc+ EVs from the multivesicular body (MVB) was a rare event (FIG. 1I). EVs have been classified into ectosomes and exosomes based on their size and biogenesis differences. Like its homologs, viral capsid gag proteins, Arc appeared to mediate direct outward budding of ectosomes, which are larger than exosomes that are released from the MVB fused to donor cell membrane. Indeed, NTA size distribution confirmed donor cell culture imaging that eaEVs are more likely ectosomes than exosomes (FIG. 1D and FIG. 12A′-12C′). Upon transduction into recipient cells, successful eaEV uptake and cargo translation in recipient RAW264.7 cells were shown by live-cell epifluorescence microscopy (EFM) of an EV membrane stain and the GFP expression (FIG. 1J). GFP was observed only in recipient cells with CMDR (CellMask Deep Red), a plasma membrane stain used to label EVs after their isolation from the donor cell culture before their transfer into recipient cells. Altogether this data shows engineered, produced, and isolated eaEV that can load and deliver mRNA.

### Example 2. A5U-eaEV can Load mRNA with Improved Efficacy and Selectivity

[0110] Selective packaging of the 5′UTR of the HIV-1 genome depends upon Gag protein intact capsid (CA) domain lattice. Therefore, Arc protein may bind to the A5U through ionic interactions in its N-terminus.

[0111] As such, it was hypothesized that adding the A5U could significantly improve mRNA cargo loading efficiency. As such, to enable efficient cargo loading, the rat A5U was added to the cargo construct, as it shows more similarity in predicted secondary structure as the 5′UTR of HIV1 RNA genome, compared to those of other species (FIG. 2A). Cargo constructs with and without the 5′ UTR, A5U-GFP and GFP mRNA transcripts were transcribed in vitro (NEB, CleanCap, T7-AG, with pseudoUTP) using fluorescently labelled Cy3- and Cy5-UTP, respectively. EVs were produced by transfecting combinations of these mRNAs into the donor cell, of six control and experimental groups: (1) mock transfection (NT); (2) Arc; (3) GFP; (4) A5U-GFP; (5) Arc/GFP; (6) Arc/A5U-GFP. Fluorescence intensity reading of isolated control and engineered EVs carrying Cy3+ A5U-GFP and Cy5+ GFP cargo was performed to compare cargo loading efficiency of these EVs. The results showed that Arc significantly promoted mRNA loading into EVs (FIG. 2B&E). Confirming these results, epifluorescence microscopy of donor cell culture showed drastically increased amount of extracellular Cy3+/Cy5+ cargo mRNAs (FIG. 2C-D&F-G).

[0112] To further characterize the cargo inside the Arc capsid, RNA immuno-precipitation (RIP) followed by RT-qPCR was performed. After the lysis of EV outer membrane, an Arc antibody was used to immuno-precipitate the Arc protein capsid, which was subsequently digested to release its mRNA cargo for the quantification by RT-qPCR. These experiments showed that the A5U increased cargo mRNA encapsulation (FIG. 2H). With an optimized ratio between the capsid and cargo constructs transfected into the donor cell, the engineered Arc EV enabled both efficient (FIG. 2I) and selective (FIG. 2J) loading of A5U-GFP, among other abundant RNAs, including rArc, GAPDH, a cytosolic housekeeping gene, and 18S, one of the most prominent RNA species found in ectosomes.

[0113] Despite an overexpression of capsid Arc mRNA in the donor cell, the cargo A5U-GFP seemed favorably enriched into the capsid than Arc itself, as long as not an excessive amount of Arc mRNA was transfected to compete for encapsulation. When the ratio of (1× Arc:3× A5U-GFP) was used, Arc mRNA was merely observed in any extracellular eaEV (FIG. 2K-Q). Recipient HEK293 cells with A5U-eaEVs (Arc:A5U-GFP=1:3) were studied by immunocytochemistry (ICH) and fluorescence in situ hybridization (FISH) with quantitative hybridization chain reaction (qHCR) followed by confocal laser scanning microscopy (CLSM). The capsid protein, the cargo mRNA, and the capsid mRNA in each individual EV was visualized at extremely high resolution and their overlap was quantified in ImageJ, using a custom ImageJ macro code. This revealed that eaEV prefer to load a cargo RNA with the A51 in comparison to the capsid Arc mRNA without the A5U. On the other hand, while introducing a ratio of (3× Arc: 1× A5U-GFP), a significant amount of Arc and 18S would be encapsulated in the Arc capsid (FIG. 2J). Further optimizing the ratio between capsid and cargo RNA transfection components, it was found that with the same amount of cargo mRNA present, GFP expression in the donor cells decreased when more capsid mRNA was added (FIG. 9). This is because more capsids were synthesized to encapsulate the cargo mRNA decreasing the amount of free mRNA left for translation. Considering all these factors, it was decided to transfect a ratio of [1.5× Arc (12 pmol): 1× A5U-GFP (8 μmol) per 1 million cells] to achieve efficient and selective cargo loading without introducing excessive Arc mRNAs.

[0114] Arc plays critical roles in the CNS and its overexpression in the drug delivery system should be avoided. Because of this, the ratio between transfection components was optimized via thorough characterization powered by high-resolution qHCR and extremely sensitive RIP-qPCR, both of which enable single EV analysis with accurate quantification. The Arc EV were further engineered by adding an mRNA motif, A51, enabling highly efficient and selective packaging of the mRNA cargo.

### Example 3. A5U-eaEV can Improve the Delivery Efficacy and the Stability of mRNA Cargo

[0115] The effectiveness and stability of A5U-eaEV as an mRNA drug carrier was verified by stably increased cargo mRNA uptake in recipient cells for over one week period (FIG. 3A1). Interestingly, without the A51), RNA transduction into recipient cells seemed less efficient and, more importantly, less stable (FIG. 3A2). The mechanism is likely similar to HIV gag which requires the 5′UTR of its own genome to stabilize the capsid. The behavior of EVs after their transfer onto recipient cells is shown in FIG. 3B1-D6: at 15 minutes EVs carrying fluorescent mRNA cargo started docking onto the recipient cell membrane (FIG. 3B1-B4); from 1 hour onwards intracellular fluorescence was observed and by 4 hours virtually all recipient cells received Cy3+ A5U-eaEVs while controls were less efficient (FIG. 3C1-C4); this advantage in uptake efficiency was greatly expanded over time with not only had all cells the cargo but also more cargo in each cell (FIG. 3A1 & D1-D6). It is necessary to emphasize that the same amount of total EVs was added to each sample group. The rapid fluorescence reading to quantify total EVs using the CMDR dye was used as was done in Example 1 above. With careful optimization of the dye concentration, this method accurately quantified the relative amount of total EVs (FIG. 3E and FIG. 13). CMDR+ EVs was added to recipient cells, measured the mean fluorescence 1 hour later and the result suggested that similar numbers of total EVs were taken up by recipient cells (FIG. 3F). Thus, A5U-eaEV significantly improved the delivery efficiency and stability of mRNA cargo.

[0116] A consistent increase in GFP expression via A5U-eaEV delivery (FIG. 3G) was also observed. Despite Arc/A5U-GFP substantially promoting mRNA encapsulation in donor cells and mRNA uptake by recipient cells, RAW264.7 recipient cells showed weak and sparse GFP expression. This is likely because eaEV cargo release and translation are activity dependent in not only neurons but also immune cells. In addition to RAW264.7, this increase in cargo translation has also been verified in triple negative breast cancer cells (MDA-MB-231, FIG. 3H). In conclusion, A5U-eaEV can deliver mRNA with improved efficiency and stability in vitro.

### Example 4. Leukocyte Derived A5U-eaEV can Efficiently Deliver mRNA Across the BBB Specifically Targeting Neuroinflammation

[0117] The blood brain barrier (BBB) is a highly dynamic and selective semipermeable border separating the peripheral circulation from the central nervous system (CNS), preventing the entry of large molecule pharmaceuticals into the brain. The BBB is composed of continuous brain microvascular endothelial cells (BMEC), their tight junctions, basement membranes, pericytes, and astrocyte terminals. BMECs normally express low levels of leukocyte adhesion molecules compared to peripheral endothelial cells to prevent the margination and transmigration of immune cells into the brain. The BBB is disrupted by aged-associated low-grade inflammation. also termed inflammaging, neurodegenerative disease, as well as more severe pathological changes such as systemic inflammation and secondary injury (e.g., stroke). In response to these inflammatory stimuli from the brain, BMECs have been shown to exhibit increased permeability and elevated expression of leukocyte adhesion molecules, allowing more leukocytes (e.g., MΦs and DCs) and leukocyte derived EVs to enter the brain across the BBB. Although leukocyte EVs can enter the brain independently without involving brain infiltrating immune cells, the accumulation of such EVs becomes increased in the inflamed brain with more permeable BBB. This makes the EVs great candidates for brain drug delivery.

[0118] In addition to the neuroinflammation targeting capacity of leukocyte EVs, the native role of Arc EVs in inter-neuronal mRNA transfer should further improve the neuronal uptake of these vesicles. Moreover, the Arc capsid protects cargo mRNA from RNase degradation until the release is triggered, increasing their stability. Given these native advantages of leukocyte eaEV and the observed improvements increasing mRNA cargo loading above, these EVs may sufficiently deliver mRNA into the CNS targeting neuroinflammation.

[0119] To produce a pool of immunologically inert EVs for in vivo studies, self-derived donor leukocytes were differentiated ex vivo from BM cells harvested from mice with a homogenous major histocompatibility complex (MHC) haplotype. Upon isolation from the femur, BM cells were cultured with GM-CSF and IL-4 for 7 days (FIG. 4A-B). EVs from both MΦs and DCs have been demonstrated to cross the BBB, therefore a culture protocol for both populations was utilized, culturing subpopulations including but not limited to monocyte-derived DC, monocyte-derived MΦ, and conventional DC (FIG. 4C).

[0120] As described above, control and experiment groups of EVs were produced, isolated, and characterized by transfecting: (1) mock transfection negative control (NC); (2) Arc; (3) GFP; (4), A5U-GFP; (5) Arc GFP; (6) Arc A5U-GFP. BM-DC/MΩ can uptake its own EVs (FIG. 4D) Fine tuning the balance between secretion and uptake was critical. For these experiments, depending on the donor cell confluency, EVs were produced for 24-48 hours to reach a saturation of EVs in the supernatant medium, with total EV concentrations monitored and measured via CMDR epifluorescence intensity in time lapse experiments. Before collection, each control and experimental group were verified to contain about the same amount of total EVs. Despite differences in the proportion of eaEVs: the Arc/A5U-GFP group showed the highest proportion of eaEVs among total EVs (FIG. 4F). This difference may be due to either a higher production or stability of A5U-eaEV, as this measurement was done 42-hour post transfection (40 hours production+2-hour purification/staining) leaving plenty of time for EV degradation. To explore the potential of leukocyte-eaEV in targeting highly inflammatory brain regions across the BBB, the same amount of total EVs per each gram body weight of mice were intravenously (IV) injected into various neuroinflammation models.

[0121] To study the in vivo biodistribution of eaEVs in a pan-neuronal inflammation model, leukocyte EVs (9E+07 total EVs per gram of body weight) were injected intravenously into aged (90-week weighting ˜40 g) mice with organs collected 72 hrs later following transcardial perfusion. Cy3+ and Cy5+ fluorescently labeled mRNAs enabled the visualization of eaEV biodistribution and cargo uptake via IVIS (in vivo imaging system). For the IVIS analysis of total EV biodistribution, non-fluorescent mRNAs were transfected and labeled total EVs collected with the CMDR plasma membrane stain. Various organs (brain, liver, spleen, kidney, heart, lung) of these aged mice were perfused, fixed, dissected, and imaged by IVIS. Among experimental and control groups, a similar level of the CMDR signal was observed, representing the biodistribution of total EVs or degraded EVs, in each organ upon collection (3-day post IV injection) (FIG. 14). However, Arc clearly increased mRNA delivery in vivo (FIG. 4G-H). Surprisingly, A5U further increased the accumulation of mRNAs in the aged brain (FIG. 4G&I), whereas the GFP mRNAs, also delivered by Arc EVs, ended up mostly in the liver and kidney (FIG. 4H&J). This increase in mRNA uptake into the aged brain is similar to the in vitro uptake results (FIG. 3B1-B2), potentially due to an increase in eaEV production or a higher stability. It is known that the formation of Arc capsid requires RNA. In mouse and human donor cells, the addition of rat A5U may further stabilize the rat Arc capsid, leading to a higher production efficiency while stabilizing eaEV at the same time. Therefore, BM-DC/MP derived A5U-eaEV can specifically deliver mRNA across the BBB targeting chronic pan-neuronal inflammation.

### Example 5. Leukocyte Derived A5U-eaEV can Efficiently Deliver mRNA Across the BBB for Pan-Neuronal Expression Under Chronic Inflammation

[0122] Protein translation from cargo mRNA was examined in the brain. A5U-eaEVs were administered systemically to deliver A5U-GFP mRNA into aged (˜90 weeks) and control young mice (<24 weeks), whose brains were collected at 2 and 6 days after the administration. Neurons were labeled by NeuN (Fox-3, Hexaribonucleotide Binding Protein-3) immunohistochemistry (IHC) staining. A higher level of neuronal GFP expression (NeuN+/GFP+) was observed in the aged brain compared to the young control (FIG. 5A-E). Interestingly, in young control brains, GFP was expressed comparably to the aged brain in blood cells inside the microvessels (FIG. 5A′inset of FIG. 5A, green) or in infiltrated immune cells (FIG. 5C, green). However, only aged brains showed significant neuronal expression (FIG. 5B′inset of FIG. 5B; FIG. 5D, white). Certain brain regions (e.g., hypothalamus, FIGS. 5C-D) absorbed and expressed more cargos than others (e.g., cerebral cortex). Altogether, this aging model demonstrated the pan-neuronal delivery of mRNA by eaEV responding to chronic inflammation across the whole brain.

### Example 6. Leukocyte Derived A5U-eaEV can Efficiently Deliver mRNA Across the BBB for Specific Local Expression Under Acute Injury

[0123] In order to study the potential of eaEV targeting a confined inflammatory site, a photothrombotic stroke model was generated by inducing an ischemic damage in a small area within the mice cortex via photo-activation of the light-sensitive Rose Bengal dye, injected intraperitoneally (FIG. 6A). Leukocyte EVs (3E+07 total EVs per gram of body weight) were IV injected 24 hours after the stroke induction, and brains were collected 2 days after the EV administration A higher level of GFP expression in NeuN+ neurons of the injured brain region marked by increased Iba1 (a microglial/MΦ marker to evaluate the level of inflammation, FIG. 6B) suggested that leukocyte derived eaEV delivered mRNA across the BBB and enriched at inflammatory sites upon injury (FIG. 6C-G). In the injured area, neurons were damaged, decreasing the number of NeuN+ cells (FIG. 6H). More Iba1+ cells were counted as the site is highly inflammatory, attracting microglia and infiltrated macrophages (FIG. 6H). The number of GFP+ cells was increased (FIG. 6H). Thus, leukocyte eaEV can deliver mRNA across the BBB locally targeting injury-induced inflammation without affecting healthy cells in the same brain.

[0124] In conclusion, a safe and effective mRNA drug carrier with high cargo loading and delivery efficiency was engineered. Methods to produce and isolate eaEV were optimized, providing detailed profiling of the cargo loading and transfer efficacy. Furthermore, the ability of eaEV to cross the BBB and deliver mRNA into animal models for neuroinflammation was shown, indicating the potential of eaEV to be used in novel therapies for inflammatory conditions in the CNS.

### Example 7. Leukocyte Derived A5U-eaEV can Deliver mRNA Deep Penetrating Solid Tumors

[0125] In addition to neuroinflammation, eaEV was tested the tumor inflammatory microenvironment. Chronic inflammation and increased permeability are also prominent features of cancer, and both extrinsic and intrinsic factors can trigger an inflammatory response in the tumor microenvironment (TME), such as imbalanced immune regulation, carcinogen exposure, as well as genetic alterations leading to the activation of oncogenes or the loss of tumor suppressors. TME vasculature often possesses aberrant morphology associated with a leaky, chaotically organized, immature, thin-walled, and ill-perfused network of vessels, caused by poor pericyte coverage and supportive basement membrane disruption of endothelial cells. Therefore, it was hypothesized that leukocyte derived eaEV can deliver mRNA into the TME.

[0126] First a triple negative breast cancer (TNBC) mouse model was generated via subcutaneous injection of MDAMB231 cells (3× 106) into mice (4-6 weeks female NIH-III nude mouse). When tumor volume reached ˜1,000 mm3 (˜2 weeks), control and eaEVs carrying GFP or A5U-GFP cargo mRNAs were IV injected. EVs were produced, isolated, characterized and quantified as described above, with the same amount of total EVs injected per gram of body weight. To study the in vivo biodistribution of eaEVs in the TME, organs were collected 3 days after the IV injection for IVIS analysis. Transcardial perfusion was performed before dissecting the organs to remove any residual eaEVs in the circulation. Here, non-fluorescent mRNAs and labeled total EVs with the CMDR membrane stain were transfected. Significantly increased CMDR signal in the tumor by Arc+ EVs was observed, whereas other organs showing similar CMDR levels (FIG. 15A). In this experiment, the distribution of CMDR+ EVs could not be distinguished from that of the dye itself. Animals receiving leukocyte eaEVs showed comparable amount of CMDR in the tumor as in liver and kidney, both of which are involved in lipid metabolism (FIG. 15B). Despite having ample CMDR accumulation, a significantly higher level of GFP was expressed in the tumor shown by confocal imaging at cellular resolution (FIG. 15C). Then, the translation of cargo mRNA was examined in the tumors, which were dissected, fixed, thick-sectioned, cleared and IHC stained by K-Ras before CLSM. The results suggest that eaEV penetrated deep into the tumor tissue to express the mRNA cargo, whereases control EVs only distributed in the vicinity of duct (FIG. 15D-E). Altogether, these results demonstrated deep tumor penetration of mRNA loaded eaEV enabling efficient mRNA uptake and translation.

[0127] Since the addition of Arc improves tumor targeting, anti-tumor small molecules drugs were loaded into eaEV to test the potential of eaEV in anti-tumor therapies. Three methods were used to load these drugs: (1) small molecule drugs are added the culture media of donor cells after DNA/RNA transfection of the capsid and cargo constructs; (2) small molecule drugs are incubated with purified EVs from the donor cell culture; (3) small molecule drugs are loaded into purified eaEVs by low power sonication (six cycles of 30 s on/off for a total of 3 min, with 2 min cooling). Small molecule drugs were successfully loaded and delivered into recipient triple negative breast cancer cells (FIG. 16). Therefore, eaEV's tumor targeting feature can be used to deliver small molecule drugs deep into the tumor.

[0128] In conclusion, a safe and effective mRNA drug carrier with high cargo loading and delivery efficiency was engineered. The methods to produce and isolate eaEV were optimized, providing detailed profiling of the cargo loading and transfer efficacy. Moreover, eaEV enabled deep tumor penetration and efficient mRNA delivery in an animal model for breast cancer, demonstrating its potential in novel therapies for cancer.

TABLE 1
List of Sequences

| SEQ ID | | | |
|---|---|---|---|
| NO: | Species | Type | Description |
| 1 | Homo sapien | Nucleic Acid | Human Arc 5′ UTR sequence (NCBI Gene ID #23237) |
| 2 | Mus musculus | Nucleic Acid | Mouse Arc 5′ UTR sequence (NCBI Gene ID #11838) |
| 3 | Rattus morvegicus | Nucleic Acid | Rat Arc 5′ UTR sequence (NCBI Gene ID #54323) |
| 4 | Drosophila melanogaster | Nucleic Acid | Drosophila dArc1 5′ UTR sequence (NCBI Gene ID |
| 5 | Homo sapien | Nucleic Acid | Human Arc 3′ UTR sequence (NCBI Gene ID #23237) |
| 6 | Mus musculus | Nucleic Acid | Mouse Arc 3′ UTR sequence (NCBI Gene ID #11838) |
| 7 | Rattus morvegicus | Nucleic Acid | Rat Arc 3′ UTR sequence (NCBI Gene ID #54323) |
| 8 | Drosophila melanogaster | Nucleic Acid | Drosophila dArc1 3′ UTR sequence (NCBI Gene ID |
| 9 | Homo sapien | Nucleic Acid | Human Arc mRNA sequence (NCBI Gene ID #23237) |
| 10 | Mus musculus | Nucleic Acid | Mouse Arc mRNA sequence (NCBI Gene ID #11838) |
| 11 | Rattus morvegicus | Nucleic Acid | Rat Arc mRNA sequence (NCBI Gene ID #54323) |
| 12 | Drosophila melanogaster | Nucleic Acid | Drosophila Arc mRNA sequence (NCBI Gene ID #36595) |
| 13 | Homo sapien | Amino Acid | Human Arc amino acid sequence (NCBI Gene ID #23237) |
| 14 | Mus musculus | Amino Acid | Mouse Arc amino acid sequence (NCBI Gene ID #11838) |
| 15 | Rattus morvegicus | Amino Acid | Rat Arc amino acid sequence (NCBI Gene ID #54323) |
| 16 | Drosophila melanogaster | Amino Acid | Drosophila Arc amino acid sequence (NCBI Gene ID #36595) |
| 17 | Gallus gallus | Nucleic Acid | Arc NCBI Gene ID # 395075 |
| 18 | Xenopus tropicalis | Nucleic Acid | Arc NCBI Gene ID # 100271754 |
| 19 | Taeniopygia guttata | Nucleic Acid | Arc NCBI Gene ID # 752001 |
| 20 | Macaca mulatta | Nucleic Acid | Arc NCBI Gene ID # 702690 |
| 21 | Bos taurus | Nucleic Acid | Arc NCBI Gene ID # 519403 |
| 22 | Pan troglodytes | Nucleic Acid | Arc NCBI Gene ID # 472874 |
| 23 | Callithrix jacchus | Nucleic Acid | Arc NCBI Gene ID # 100387688 |
| 24 | Columba livia | Nucleic Acid | Arc NCBI Gene ID # 102091501 |
| 25 | Chelonia mydas | Nucleic Acid | Arc NCBI Gene ID # 102941153 |
| 26 | Mesocricetus auratus | Nucleic Acid | Arc NCBI Gene ID # 101841579 |
| 27 | Equus caballus | Nucleic Acid | Arc NCBI Gene ID # 100146865 |
| 28 | Marmota monax | Nucleic Acid | Arc NCBI Gene ID # 124095804 |
| 29 | Meles meles | Nucleic Acid | Arc NCBI Gene ID # 123941397 |
| 30 | Mirounga angustirostris | Nucleic Acid | Arc NCBI Gene ID # 123858672 |
| 31 | Phyllostomus hastatus | Nucleic Acid | Arc NCBI Gene ID # 123833165 |
| 32 | Lemur catta | Nucleic Acid | Arc NCBI Gene ID # 123644519 |
| 33 | Leopardus geoffroyi | Nucleic Acid | Arc NCBI Gene ID # 123585384 |
| 34 | Mauremys mutica | Nucleic Acid | Arc NCBI Gene ID # 123365322 |
| 35 | Equus asinus | Nucleic Acid | Arc NCBI Gene ID # 123275551 |
| 36 | Gracilinanus agilis | Nucleic Acid | Arc NCBI Gene ID # 123231978 |
| 37 | Varanus komodoensis | Nucleic Acid | Arc NCBI Gene ID # 123035313 |
| 38 | Bufo gargarizans | Nucleic Acid | Arc NCBI Gene ID # 122939220 |
| 39 | Neogale vison | Nucleic Acid | Arc NCBI Gene ID # 122905503 |
| 40 | Dromiciops gliroides | Nucleic Acid | Arc NCBI Gene ID # 122736597 |
| 41 | Cervus elaphus | Nucleic Acid | Arc NCBI Gene ID # 122679325 |
| 42 | Prionailurus bengalensis | Nucleic Acid | Arc NCBI Gene ID # 122495866 |
| 43 | Cervus canadensis | Nucleic Acid | Arc NCBI Gene ID # 122451035 |
| 44 | Panthera tigris | Nucleic Acid | Arc NCBI Gene ID # 122234928 |
| 45 | Panthera leo | Nucleic Acid | Arc NCBI Gene ID # 122210737 |
| 46 | Lagopus leucura | Nucleic Acid | Arc NCBI Gene ID # 122178992 |
| 47 | Centrocercus urophasianus | Nucleic Acid | Arc NCBI Gene ID # 122155226 |
| 48 | Dipodomys spectabilis | Nucleic Acid | Arc NCBI Gene ID # 122125347 |
| 49 | Sceloporus undulatus | Nucleic Acid | Arc NCBI Gene ID # 121930018 |
| 50 | Corvus kubaryi | Nucleic Acid | Arc NCBI Gene ID # 121668452 |
| 51 | Vulpes lagopus | Nucleic Acid | Arc NCBI Gene ID # 121498529 |
| 52 | Microtus oregoni | Nucleic Acid | Arc NCBI Gene ID # 121461017 |
| 53 | Pyrgilauda ruficollis | Nucleic Acid | Arc NCBI Gene ID # 121349289 |
| 54 | Onychostruthus taczanowskii | Nucleic Acid | Arc NCBI Gene ID # 121335950 |
| 55 | Ochotona curzoniae | Nucleic Acid | Arc NCBI Gene ID # 121161888 |
| 56 | Falco naumanni | Nucleic Acid | Arc NCBI Gene ID # 121085152 |
| 57 | Cygnus olor | Nucleic Acid | Arc NCBI Gene ID # 121065018 |
| 58 | Puma yagouaroundi | Nucleic Acid | Arc NCBI Gene ID # 121025873 |
| 59 | Bufo bufo | Nucleic Acid | Arc NCBI Gene ID # 121002044 |
| 60 | Rana temporaria | Nucleic Acid | Arc NCBI Gene ID # 120939740 |
| 61 | Oryx dammah | Nucleic Acid | Arc NCBI Gene ID # 120878789 |
| 62 | Hirundo rustica | Nucleic Acid | Arc NCBI Gene ID # 120753894 |
| 63 | Pteropus giganteus | Nucleic Acid | Arc NCBI Gene ID # 120588762 |
| 64 | Passer montanus | Nucleic Acid | Arc NCBI Gene ID # 120504749 |
| 65 | Mauremys reevesii | Nucleic Acid | Arc NCBI Gene ID # 120396602 |
| 66 | Crotalus tigris | Nucleic Acid | Arc NCBI Gene ID # 120314226 |
| 67 | Hyaena hyaena | Nucleic Acid | Arc NCBI Gene ID # 120232326 |
| 68 | Tachyglossus aculeatus | Nucleic Acid | Arc NCBI Gene ID # 119940264 |
| 69 | Dermochelys coriacea | Nucleic Acid | Arc NCBI Gene ID # 119850344 |
| 70 | Arvicola amphibius | Nucleic Acid | Arc NCBI Gene ID # 119822193 |
| 71 | Motacilla alba alba | Nucleic Acid | Arc NCBI Gene ID # 119698080 |
| 72 | Talpa occidentalis | Nucleic Acid | Arc NCBI Gene ID # 119232354 |
| 73 | Falco rusticolus | Nucleic Acid | Arc NCBI Gene ID # 119145010 |
| 74 | Artibeus jamaicensis | Nucleic Acid | Arc NCBI Gene ID # 119064763 |
| 75 | Sturnira hondurensis | Nucleic Acid | Arc NCBI Gene ID # 118988716 |
| 76 | Manis pentadactyla | Nucleic Acid | Arc NCBI Gene ID # 118930717 |
| 77 | Balaenoptera musculus | Nucleic Acid | Arc NCBI Gene ID # 118883868 |
| 78 | Trichosurus vulpecula | Nucleic Acid | Arc NCBI Gene ID # 118828797 |
| 79 | Pipistrellus kuhlii | Nucleic Acid | Arc NCBI Gene ID # 118718627 |
| 80 | Molothrus ater | Nucleic Acid | Arc NCBI Gene ID # 118701631 |
| 81 | Myotis myotis | Nucleic Acid | Arc NCBI Gene ID # 118670582 |
| 82 | Molossus molossus | Nucleic Acid | Arc NCBI Gene ID # 118643339 |
| 83 | Onychomys torridus | Nucleic Acid | Arc NCBI Gene ID # 118597471 |
| 84 | Halichoerus grypus | Nucleic Acid | Arc NCBI Gene ID # 118548735 |
| 85 | Cygnus atratus | Nucleic Acid | Arc NCBI Gene ID # 118257931 |
| 86 | Oxyura jamaicensis | Nucleic Acid | Arc NCBI Gene ID # 118162701 |
| 87 | Zootoca vivipara | Nucleic Acid | Arc NCBI Gene ID # 118090548 |
| 88 | Mirounga leonina | Nucleic Acid | Arc NCBI Gene ID # 118015255 |
| 89 | Trachemys scripta elegans | Nucleic Acid | Arc NCBI Gene ID # 117873854 |
| 90 | Arvicanthis niloticus | Nucleic Acid | Arc NCBI Gene ID # 117719109 |
| 91 | Pantherophis guttatus | Nucleic Acid | Arc NCBI Gene ID # 117666901 |
| 92 | Trachypithecus francoisi | Nucleic Acid | Arc NCBI Gene ID # 117079334 |
| 93 | Lacerta agilis | Nucleic Acid | Arc NCBI Gene ID # 117050329 |
| 94 | Rhinolophus ferrumequinum | Nucleic Acid | Arc NCBI Gene ID # 117033761 |
| 95 | Catharus ustulatus | Nucleic Acid | Arc NCBI Gene ID # 117004964 |
| 96 | Rattus rattus | Nucleic Acid | Arc NCBI Gene ID # 116912504 |
| 97 | Lontra canadensis | Nucleic Acid | Arc NCBI Gene ID # 116877009 |
| 98 | Chelonoidis abingdonii | Nucleic Acid | Arc NCBI Gene ID # 116815155 |
| 99 | Hylobates moloch | Nucleic Acid | Arc NCBI Gene ID # 116813636 |
| 100 | Chiroxiphia lanceolata | Nucleic Acid | Arc NCBI Gene ID # 116798476 |
| 101 | Phocoena sinus | Nucleic Acid | Arc NCBI Gene ID # 116742157 |
| 102 | Phoca vitulina | Nucleic Acid | Arc NCBI Gene ID # 116639541 |
| 103 | Mustela erminea | Nucleic Acid | Arc NCBI Gene ID # 116575408 |
| 104 | Sapajus apella | Nucleic Acid | Arc NCBI Gene ID # 116534300 |
| 105 | Thamnophis elegans | Nucleic Acid | Arc NCBI Gene ID # 116512059 |
| 106 | Aythya fuligula | Nucleic Acid | Arc NCBI Gene ID # 116486828 |
| 107 | Corvus moneduloides | Nucleic Acid | Arc NCBI Gene ID # 116435325 |
| 108 | Phasianus colchicus | Nucleic Acid | Arc NCBI Gene ID # 116227526 |
| 109 | Mastomys coucha | Nucleic Acid | Arc NCBI Gene ID # 116081111 |
| 110 | Camarhynchus parvulus | Nucleic Acid | Arc NCBI Gene ID # 115900969 |
| 111 | Globicephala melas | Nucleic Acid | Arc NCBI Gene ID # 115863283 |
| 112 | Gopherus evgoodei | Nucleic Acid | Arc NCBI Gene ID # 115647144 |
| 113 | Strigops habroptila | Nucleic Acid | Arc NCBI Gene ID # 115617032 |
| 114 | Anas platyrhynchos | Amino Acid | Peking Duck Arc amino acid sequence |
| | | | (NCBI Gene ID # 101790723) |
| 115 | Gallus gallus | Amino Acid | Arc NCBI Gene ID # 395075 |
| 116 | Xenopus tropicalis | Amino Acid | Arc NCBI Gene ID # 100271754 |
| 117 | Taeniopygia guttata | Amino Acid | Arc NCBI Gene ID # 752001 |
| 118 | Macaca mulatta | Amino Acid | Arc NCBI Gene ID # 702690 |
| 119 | Bos taurus | Amino Acid | Arc NCBI Gene ID # 519403 |
| 120 | Pan troglodytes | Amino Acid | Arc NCBI Gene ID # 472874 |
| 121 | Callithrix jacchus | Amino Acid | Arc NCBI Gene ID # 100387688 |
| 122 | Columba livia | Amino Acid | Arc NCBI Gene ID # 102091501 |
| 123 | Chelonia mydas | Amino Acid | Arc NCBI Gene ID # 102941153 |
| 124 | Mesocricetus auratus | Amino Acid | Arc NCBI Gene ID # 101841579 |
| 125 | Equus caballus | Amino Acid | Arc NCBI Gene ID # 100146865 |
| 126 | Marmota monax | Amino Acid | Arc NCBI Gene ID # 124095804 |
| 127 | Meles meles | Amino Acid | Arc NCBI Gene ID # 123941397 |
| 128 | Mirounga angustirostris | Amino Acid | Arc NCBI Gene ID # 123858672 |
| 129 | Phyllostomus hastatus | Amino Acid | Arc NCBI Gene ID # 123833165 |
| 130 | Lemur catta | Amino Acid | Arc NCBI Gene ID # 123644519 |
| 131 | Leopardus geoffroyi | Amino Acid | Arc NCBI Gene ID # 123585384 |
| 132 | Mauremys mutica | Amino Acid | Arc NCBI Gene ID # 123365322 |
| 133 | Equus asinus | Amino Acid | Arc NCBI Gene ID # 123275551 |
| 134 | Gracilinanus agilis | Amino Acid | Arc NCBI Gene ID # 123231978 |
| 135 | Varanus komodoensis | Amino Acid | Arc NCBI Gene ID # 123035313 |
| 136 | Bufo gargarizans | Amino Acid | Arc NCBI Gene ID # 122939220 |
| 137 | Neogale vison | Amino Acid | Arc NCBI Gene ID # 122905503 |
| 138 | Dromiciops gliroides | Amino Acid | Arc NCBI Gene ID # 122736597 |
| 139 | Cervus elaphus | Amino Acid | Arc NCBI Gene ID # 122679325 |
| 140 | Prionailurus bengalensis | Amino Acid | Arc NCBI Gene ID # 122495866 |
| 141 | Cervus canadensis | Amino Acid | Arc NCBI Gene ID # 122451035 |
| 142 | Panthera tigris | Amino Acid | Arc NCBI Gene ID # 122234928 |
| 143 | Panthera leo | Amino Acid | Arc NCBI Gene ID # 122210737 |
| 144 | Lagopus leucura | Amino Acid | Arc NCBI Gene ID # 122178992 |
| 145 | Centrocercus urophasianus | Amino Acid | Arc NCBI Gene ID # 122155226 |
| 146 | Dipodomys spectabilis | Amino Acid | Arc NCBI Gene ID # 122125347 |
| 147 | Dipodomys spectabilis | Amino Acid | Arc NCBI Gene ID # 122125347 |
| 148 | Sceloporus undulatus | Amino Acid | Arc NCBI Gene ID # 121930018 |
| 149 | Corvus kubaryi | Amino Acid | Arc NCBI Gene ID # 121668452 |
| 150 | Vulpes lagopus | Amino Acid | Arc NCBI Gene ID # |
| 151 | Microtus oregoni | Amino Acid | Arc NCBI Gene ID # 121461017 |
| 152 | Pyrgilauda ruficollis | Amino Acid | Arc NCBI Gene ID # 121349289 |
| 153 | Onychostruthus taczanowskii | Amino Acid | Arc NCBI Gene ID # 121335950 |
| 154 | Ochotona curzoniae | Amino Acid | Arc NCBI Gene ID # 121161888 |
| 155 | Falco naumanni | Amino Acid | Arc NCBI Gene ID # 121085152 |
| 156 | Cygnus olor | Amino Acid | Arc NCBI Gene ID # 121065018 |
| 157 | Puma yagouaroundi | Amino Acid | Arc NCBI Gene ID # 121025873 |
| 158 | Bufo bufo | Amino Acid | Arc NCBI Gene ID # 121002044 |
| 159 | Rana temporaria | Amino Acid | Arc NCBI Gene ID # 120939740 |
| 160 | Oryx dammah | Amino Acid | Arc NCBI Gene ID # 120878789 |
| 161 | Hirundo rustica | Amino Acid | Arc NCBI Gene ID # 120753894 |
| 162 | Pteropus giganteus | Amino Acid | Arc NCBI Gene ID # 120588762 |
| 163 | Passer montanus | Amino Acid | Arc NCBI Gene ID # 120504749 |
| 164 | Mauremys reevesii | Amino Acid | Arc NCBI Gene ID # 120396602 |
| 165 | Crotalus tigris | Amino Acid | Arc NCBI Gene ID # 120314226 |
| 166 | Hyaena hyaena | Amino Acid | Arc NCBI Gene ID # 120232326 |
| 167 | Tachyglossus aculeatus | Amino Acid | Arc NCBI Gene ID # 119940264 |
| 168 | Dermochelys coriacea | Amino Acid | Arc NCBI Gene ID # 119850344 |
| 169 | Arvicola amphibius | Amino Acid | Arc NCBI Gene ID # 119822193 |
| 170 | Motacilla alba alba | Amino Acid | Arc NCBI Gene ID # 119698080 |
| 171 | Talpa occidentalis | Amino Acid | Arc NCBI Gene ID # 119232354 |
| 172 | Falco rusticolus | Amino Acid | Arc NCBI Gene ID # 119145010 |
| 173 | Artibeus jamaicensis | Amino Acid | Arc NCBI Gene ID # 119064763 |
| 174 | Sturnira hondurensis | Amino Acid | Arc NCBI Gene ID # 118988716 |
| 175 | Manis pentadactyla | Amino Acid | Arc NCBI Gene ID # 118930717 |
| 176 | Balaenoptera musculus | Amino Acid | Arc NCBI Gene ID # 118883868 |
| 177 | Trichosurus vulpecula | Amino Acid | Arc NCBI Gene ID # 118828797 |
| 178 | Pipistrellus kuhlii | Amino Acid | Arc NCBI Gene ID # 118718627 |
| 179 | Molothrus ater | Amino Acid | Arc NCBI Gene ID # 118701631 |
| 180 | Myotis myotis | Amino Acid | Arc NCBI Gene ID # 118670582 |
| 181 | Molossus molossus | Amino Acid | Arc NCBI Gene ID # 118643339 |
| 182 | Onychomys torridus | Amino Acid | Arc NCBI Gene ID # 118597471 |
| 183 | Halichoerus grypus | Amino Acid | Arc NCBI Gene ID # 118548735 |
| 184 | Cygnus atratus | Amino Acid | Arc NCBI Gene ID # 118257931 |
| 185 | Oxyura jamaicensis | Amino Acid | Arc NCBI Gene ID # 118162701 |
| 186 | Zootoca vivipara | Amino Acid | Arc NCBI Gene ID # 118090548 |
| 187 | Mirounga leonina | Amino Acid | Arc NCBI Gene ID # 118015255 |
| 188 | Trachemys scripta elegans | Amino Acid | Arc NCBI Gene ID # 117873854 |
| 189 | Arvicanthis niloticus | Amino Acid | Arc NCBI Gene ID # 117719109 |
| 190 | Pantherophis guttatus | Amino Acid | Arc NCBI Gene ID # 117666901 |
| 191 | Trachypithecus francoisi | Amino Acid | Arc NCBI Gene ID # 117079334 |
| 192 | Lacerta agilis | Amino Acid | Arc NCBI Gene ID # 117050329 |
| 193 | Rhinolophus ferrumequinum | Amino Acid | Arc NCBI Gene ID # 117033761 |
| 194 | Catharus ustulatus | Amino Acid | Arc NCBI Gene ID # 117004964 |
| 195 | Rattus rattus | Amino Acid | Arc NCBI Gene ID # 116912504 |
| 196 | Lontra canadensis | Amino Acid | Arc NCBI Gene ID # 116877009 |
| 197 | Chelonoidis abingdonii | Amino Acid | Arc NCBI Gene ID # 116815155 |
| 198 | Hylobates moloch | Amino Acid | Arc NCBI Gene ID # 116813636 |
| 199 | Chiroxiphia lanceolata | Amino Acid | Arc NCBI Gene ID # 116798476 |
| 200 | Phocoena sinus | Amino Acid | Arc NCBI Gene ID # 116742157 |
| 201 | Phoca vitulina | Amino Acid | Arc NCBI Gene ID # 116639541 |
| 202 | Mustela erminea | Amino Acid | Arc NCBI Gene ID # 116575408 |
| 203 | Sapajus apella | Amino Acid | Arc NCBI Gene ID # 116534300 |
| 204 | Thamnophis elegans | Amino Acid | Arc NCBI Gene ID # 116512059 |
| 205 | Aythya fuligula | Amino Acid | Arc NCBI Gene ID # 116486828 |
| 206 | Corvus moneduloides | Amino Acid | Arc NCBI Gene ID # 116435325 |
| 207 | Phasianus colchicus | Amino Acid | Arc NCBI Gene ID # 116227526 |
| 208 | Mastomys coucha | Amino Acid | Arc NCBI Gene ID # 116081111 |
| 209 | Camarhynchus parvulus | Amino Acid | Arc NCBI Gene ID # 115900969 |
| 210 | Globicephala melas | Amino Acid | Arc NCBI Gene ID # 115863283 |
| 211 | Gopherus evgoodei | Amino Acid | Arc NCBI Gene ID # 115647144 |
| 212 | Strigops habroptila | Amino Acid | Arc NCBI Gene ID # 115617032 |

What is claimed is:

1. An RNA transcript composition comprising a cargo mRNA which comprises an Arc 5′UTR sequence.

2. The RNA transcript composition of claim 1, further comprising an Arc mRNA.

3. The composition of claim 1 or 2, wherein the Arc 5′UTR sequence comprises an Arc 5′UTR sequence from a mammal.

4. The composition of any one of claims 1-3, wherein the Arc 5′UTR sequence comprises an Arc 5′UTR sequence from human, mouse, or rat.

5. The composition of claim 1 or 2, wherein the Arc 5′UTR sequence comprises an Arc 5′UTR sequence from drosophila.

6. The composition of any one of claims 1-5, wherein the Arc 5′UTR sequence comprises a sequence having at least 80% sequence identity, at least 85% sequence identity, at least 90% sequence identity, at least 95% sequence identity, at least 98% sequence identity, or at least 99% sequence identity to any one of SEQ ID NOS: 1-4.

7. The composition of any one of claims 1-6, wherein the cargo mRNA further comprises a poly(A) signal.

8. The composition of any one of claims 1-7, wherein the cargo mRNA encodes a therapeutic protein.

9. The composition of any one of claims 1-7, wherein the cargo mRNA encodes a peptide, an enzyme, a cytokine, a hormone, a growth factor, an antigen, an antibody, a portion of an antibody, a clotting factor, a regulatory protein, a signaling protein, a transcription protein, and/or a receptor.

10. The composition of any one of claims 1-7, wherein the cargo mRNA encodes a fluorescent protein, a bioluminescent protein, and/or a recombinase reporter.

11. The composition of any one of claims 1-10, wherein the Arc mRNA comprises an Arc 3′UTR sequence.

12. The composition of any one of claims 1-11, wherein the Arc mRNA comprises an Arc 3′UTR sequence from a mammal.

13. The composition of claim 12, wherein the mammal is human, mouse, or rat.

14. The composition of any one of claims 1-11, wherein the Arc 3′UTR sequence comprises an Arc 3′UTR sequence from drosophila.

15. The composition of any one of claims 11-14, wherein the Arc 3′UTR sequence comprises a sequence having at least 80% sequence identity, at least 85% sequence identity, at least 90% sequence identity, at least 95% sequence identity, at least 98% sequence identity, or at least 99% sequence identity to any one of SEQ ID NOS: 5-8.

16. The composition of any one of claims 1-15, wherein the Arc mRNA further comprises a poly(A) signal.

17. The composition of any one of claims 1-16, wherein the Arc mRNA encodes an Arc protein from a mammal.

18. The composition of claim 17, wherein the mammal is human, mouse, or rat.

19. The composition of any one of claims 1-16, wherein the Arc mRNA encodes an Arc protein from drosophila.

20. The composition of any one of claims 1-19, wherein the Arc mRNA comprises an Arc mRNA sequence from a mammal.

21. The composition of claim 20, wherein the mammal is human, mouse, or rat.

22. The composition of any one of claims 1-19, wherein the Arc mRNA comprises an Arc mRNA sequence from drosophila.

23. The composition of any one of claims 20-22, wherein the Arc mRNA comprises a nucleotide sequence having at least 80% sequence identity, at least 85% sequence identity, at least 90% sequence identity, at least 95% sequence identity, at least 98% sequence identity, or at least 99% sequence identity to any one of SEQ ID NOS: 9-12.

24. A recombinant system comprising a DNA encoding a cargo mRNA which comprises an Arc Arc 5′UTR sequence.

25. The system of claim 24, further comprising a second DNA encoding an Arc mRNA.

26. The system of claim 24 or 25, wherein the Arc 5′UTR sequence comprises an Arc 5′UTR sequence from a mammal.

27. The system of any one of claims 24-26, wherein the Arc 5′UTR sequence comprises an Arc 5′UTR sequence from human, mouse, or rat.

28. The system of claim 24 or 25, wherein the Arc 5′UTR sequence comprises an Arc 5′UTR sequence from drosophila.

29. The system of any one of claims 24-28, wherein the Arc 5′UTR sequence comprises a sequence having at least 80% sequence identity, at least 85% sequence identity, at least 90% sequence identity, at least 95% sequence identity, at least 98% sequence identity, or at least 99% sequence identity to any one of SEQ ID NOS: 1-4.

30. The system of any one of claims 24-29, wherein the cargo mRNA further comprises a poly(A) signal.

31. The system of any one of claims 24-30, wherein the cargo mRNA encodes a therapeutic protein.

32. The system of any one of claims 24-30, wherein the cargo mRNA encodes a peptide, an enzyme, a cytokine, a hormone, a growth factor, an antigen, an antibody, a portion of an antibody, a clotting factor, a regulatory protein, a signaling protein, a transcription protein, and/or a receptor.

33. The system of any one of claims 24-30, wherein the cargo mRNA encodes a fluorescent protein, a bioluminescent protein, and/or a recombinase reporter.

34. The system of any one of claims 24-33, wherein the Arc mRNA comprises an Arc 3′UTR sequence.

35. The system of any one of claims 24-34, wherein the Arc 3′UTR sequence comprises an Arc 3′UTR sequence from a mammal.

36. The system of any one of claims 24-35, wherein the Arc 3′UTR sequence comprises an Arc 3′UTR sequence is selected from human, mouse, or rat.

37. The system of any one of claims 24-33, wherein the Arc 3′UTR sequence comprises an Arc 3′UTR sequence from drosophila.

38. The system of any one of claims 34-37, wherein the Arc 3′UTR sequence comprises a sequence having at least 80% sequence identity, at least 85% sequence identity, at least 90% sequence identity, at least 95% sequence identity, at least 98% sequence identity, or at least 99% sequence identity to any one of SEQ ID NOS: 5-8.

39. The system of any one of claims 24-38, wherein the Arc mRNA further comprises a poly(A) signal.

40. The system of any one of claims 24-39, wherein the system comprises a single plasmid comprising the DNA encoding a cargo mRNA with an Arc 5′UTR sequence and the second DNA encoding an Arc mRNA.

41. The system of any one of claims 24-39, wherein the system comprises:
a first plasmid comprising the DNA encoding a cargo mRNA with an Arc 5′UTR sequence; and
a second plasmid comprising the second DNA encoding an Arc mRNA.

42. The system of any one of claims 40-41, wherein the plasmid(s) further comprises a heterologous DNA regulatory element.

43. The system of claim 42, wherein the heterologous DNA regulatory element comprises a promoter, an enhancer, a silencer, an insulator, or combinations thereof.

44. The system of any one of claims 24-43, wherein the Arc mRNA comprises an Arc mRNA sequence from a mammal.

45. The system of claim 44, wherein the mammal is human, mouse, or rat.

46. The system of any one of claims 24-43, wherein the Arc mRNA comprises an Arc mRNA sequence from drosophila.

47. The system of any one of claims 44-46, wherein the Arc 5′UTR sequence comprises a nucleotide sequence having at least 80% sequence identity, at least 85% sequence identity, at least 90% sequence identity, at least 95% sequence identity, at least 98% sequence identity, or at least 99% sequence identity to any one of SEQ ID NOS: 1-4.

48. The system of any one of claims 24-47, wherein the Arc mRNA encodes an Arc protein from a mammal.

49. The system of claim 48, wherein the mammal is human, mouse, or rat.

50. The system of any one of claims 24-47, wherein the Arc mRNA encodes an Arc protein from drosophila.

51. The system of any one of claims 24-50, wherein the Arc mRNA comprises an Arc mRNA sequence from a mammal.

52. The system of claim 51, wherein the mammal is human, mouse, or rat.

53. The system of any one of claims 24-50, wherein the Arc mRNA comprises an Arc mRNA sequence from drosophila.

54. The system of any one of claims 51-53, wherein the Arc mRNA comprises a nucleotide sequence having at least 80% sequence identity, at least 85% sequence identity, at least 90% sequence identity, at least 95% sequence identity, at least 98% sequence identity, or at least 99% sequence identity to any one of SEQ ID NOS: 9-12.

55. An extracellular vesicle comprising:
an Arc protein; and
a cargo mRNA comprising an Arc 5′UTR sequence.

56. The vesicle of claim 55, wherein the Arc 5′UTR sequence comprises an Arc 5′UTR sequence from a mammal.

57. The vesicle of claim 55 or claim 56, wherein the Arc 5′UTR sequence comprises an Arc 5′UTR sequence from human, mouse, or rat.

58. The vesicle of claim 55, wherein the Arc 5′UTR sequence comprises an Arc 5′UTR sequence from drosophila.

59. The vesicle of any one of claims 55-58, wherein the Arc 5′UTR sequence comprises a sequence having at least 80% sequence identity, at least 85% sequence identity, at least 90% sequence identity, at least 95% sequence identity, at least 98% sequence identity, or at least 99% sequence identity to any one of SEQ ID NOS: 1-4.

60. The vesicle of any one of claims 55-59, wherein the cargo mRNA further comprises a poly(A) signal.

61. The vesicle of any one of claims 55-60, wherein the cargo mRNA encodes a therapeutic protein.

62. The vesicle of any one of claims 55-60, wherein the cargo mRNA encodes a peptide, an enzyme, a cytokine, a hormone, a growth factor, an antigen, an antibody, a portion of an antibody, a clotting factor, a regulatory protein, a signaling protein, a transcription protein, and/or a receptor.

63. The vesicle of any one of claims 55-60, wherein the cargo mRNA encodes a fluorescent protein, a bioluminescent protein, and/or a recombinase reporter.

64. The vesicle of any one of claims 55-63, wherein the Arc protein comprises an Arc protein sequence from a mammal.

65. The vesicle of claim 64, wherein the mammal is human, mouse, or rat.

66. The vesicle of any one of claims 55-63, wherein the Arc protein comprises an Arc protein sequence from drosophila.

67. The vesicle of any one of claims 55-60, wherein the Arc protein comprises at least 80% sequence identity, at least 85% sequence identity, at least 90% sequence identity, at least 95% sequence identity, at least 98% sequence identity, or at least 99% sequence identity to any one of SEQ ID NOS: 13-16.

68. The vesicle of any one of claims 55-67, further comprising one or more small molecule drugs.

69. A method for producing extracellular vesicles, the method comprising:
(a) obtaining cells comprising an Arc mRNA and a cargo mRNA which comprises an Arc 5′ UTR;
(b) growing the cells in a media under conditions to express an Arc protein encoded by the Arc mRNA, wherein the cells produce extracellular vesicles comprising the Arc protein and the cargo mRNA with the Arc 5′UTR sequence; and
(c) isolating the extracellular vesicles from the media.

70. The method of claim 69, wherein the cells of step (a) are obtained by introducing into donor cells, a DNA construct which is transcribed into the Arc mRNA and a DNA construct which is transcribed into the cargo mRNA.

71. The method of claim 69, wherein the cells of step (a) are obtained by introducing into donor cells, the Arc mRNA and the cargo mRNA.

72. The method of any one of claims 69-71, wherein a recombinant construct is delivered in the form of DNA, RNA, or the combination of both.

73. The method of any one of claims 69-71, wherein the cell is a prokaryotic cell.

74. The method of any one of claims 69-71, wherein the cell is a eukaryotic cell.

75. The method of claim 74, wherein the cell is a mammalian cell.

76. The method of claim 75, wherein the cell is a human cell.

77. The method of claim 70 or claim 71, wherein the donor cells are selected from neural cells, epithelial cells, endothelial cells, hematopoietic cells, connective tissue cells, muscle cells, bone cells, cartilage cells, germline cells, adipocytes, stem cells, self-derived ex vivo differentiated cells, iPSC-derived ex vivo differentiated cells, cancer cells, and combinations thereof.

78. The method of claim 70 or claim 71, wherein the donor cells are leukocytes.

79. The method of claim 78, wherein the donor cells are self-derived ex vivo differentiated leukocytes.

80. The method of claim 79, wherein the donor cells are self-derived ex vivo differentiated monocytes, macrophages, dendritic cells, or combinations thereof.

81. The method of claim 77, wherein the donor cells are iPSC-derived ex vivo differentiated leukocytes.

82. The method of claim 78, wherein the donor cells are iPSC-derived ex vivo differentiated monocytes, macrophages, dendritic cells, or combinations thereof.

83. The method of any one of claims 69-82, wherein the cells comprising a nucleic acid construct as described in any of the preceding claims are prepared by transfecting cells with a nucleic acid construct as described in any of the preceding claims, wherein the transfection is carried out with polyethyleneimine (PEI) complexation, electroporation, cationic lipids complexation, lipid nanoparticle-mediated delivery, microinjection, and combinations thereof.

84. A method for delivering mRNA to a recipient cell, the method comprising:
obtaining an extracellular vesicle as described; and
contacting the recipient cell with the extracellular vesicle, wherein the extracellular vesicle fuses with the recipient cell, thereby delivering mRNA to the recipient cell.

85. The method of claim 84, wherein the contacting is performed in vitro.

86. The method of claim 84, wherein the contacting is performed in vivo.

87. The method of any one of claims 84-86, wherein the recipient cell is a mammalian cell.

88. The method of any one of claims 84-87, wherein the recipient cell comprises a hematopoietic cell, a non-hematopoietic cell, a stem cell, or combinations thereof.

89. The method of any one of claims 84-88, wherein the mRNA is delivered to a recipient cell to treat a disease, produce a protein, induce cell death, repress cell death, change cellular ageing, induce immune tolerance, modulate existing immune response, modify intracellular activity, modify cellular behavior, or combinations thereof.

90. A method for treating a subject in need thereof comprising:
obtaining extracellular vesicles as described; and
administering the extracellular vesicles to the subject.

91. The method of claim 90, wherein the extracellular vesicles are administered orally, rectally, intravenously, intramuscularly, subcutaneously, intrauterinely, cerebrovascularly, or intraventricularly.

92. The method of claim 90 or claim 91, wherein the extracellular vesicles comprise mRNAs of CRISPR-associated proteins and guide RNAs adapted for treatment of disease including a genetic disorder.

93. The method of any one of claims 90-92, wherein the extracellular vesicles are administered to the subject for treatment of neurodegeneration diseases, aging related disorders, brain tumors, an inflammatory condition, delivering RNAs specifically into inflammatory brain tissues crossing the blood brain barrier without affecting the healthy cells.

94. The method of claim 90 or claim 91, wherein the extracellular vesicles are adapted to deliver APOE4 RNA into the brain for the treatment of Alzheimer's disease.

95. The method of any one of claims 90-92, wherein the extracellular vesicles are administered for treatment of cancer, targeting tumor cells without affecting healthy tissues. Examples in this category include delivering IL 12 mRNA or OX40L mRNA for the treatment of solid tumors.

96. The method of claim 90 or claim 91, wherein the extracellular vesicles comprise mRNA corresponding to tumor associated antigens and wherein the extracellular vesicles are delivered as cancer vaccines for the treatment of cancer, including melanoma, colon cancer, gastrointestinal cancer, genitourinary cancer, hepatocellular cancer.

97. The method of claim 90 or claim 91, wherein the extracellular vesicles are delivered for the prevention and/or treatment of infectious diseases.

98. The method of claim 90 or claim 91, wherein the extracellular vesicles are delivered for the treatment of autoimmune diseases.

99. A method to deliver the construct of claim 1 to a recipient cell in vivo to produce an extracellular vesicle as described in claim 55 in vivo using an endogenous Arc.

100. The method of claim 99, wherein the vesicle is produced by the endogenous Arc in vivo.

101. The method of claim 99, wherein the construct is delivered in the form of DNA and/or RNA.

102. The method of claim 99, wherein the construct is delivered by a lipid nanoparticle, an exosome, a virus, and other gene delivery methods.

The application's sequence listing, which the Patent Office published only in electronic form, follows.

SEQUENCE LISTING (212 sequences)

SEQ ID NO: 1 - DNA, 208 bp, Homo sapiens
gcagagctcgggcgcggcgtcctccctccgcagcagccgagccggacctgcctccccgggcgtgctccgccggccccgccgccggcccgcagcgacagacaggcgctccccgcagctccgcacgggacccaggccgccggaccccagcgccggaccaccctctgtccgccccgaggagtttgccgcctgccggagcacctgcgcacag

SEQ ID NO: 2 - DNA, 196 bp, Mus musculus
agagctcaagcgagttctcccgcagccgcagtctctgggcctctctagcttcagcggcgacgagcctgccacactcgctaagctcctccggcaccgcacacctgccactgccgctgcagccgccggctctgctcccttccggcttctgcctcagaggagttcttagcctgttcggagccgcagcaccgacgaccag

SEQ ID NO: 3 - DNA, 216 bp, Rattus norvegicus
agtgctctggcgagtagtcctccctcagccgcagtctctgggcctcttcagcttgagcggcggcgagcctgctacactcgctaagctcctccggcaccgcgcacttgccactgccactgccgcttcgcgcccgctgcagccgccggctctgaatccttctggcttccgcctcagaggagttcttagcctgtcccgaaccgtaaccccggcgagcag

SEQ ID NO: 4 - DNA, 97 bp, Drosophila melanogaster
tgttcagttcaaatcaccggccgcattcgctacactggctttgtccgccgactgaaccaagattaatttgatcacctaacctcacacagcagcgaaa

SEQ ID NO: 5 - DNA, 1551 bp, Homo sapiens
agggcatcccggagcccccagcctgcccactacatccagcctgtggctttgcccaccaggacttttgagctggggctgactcctgcaggggaagccctggtccagctgggtgccccctcgagctccgggcggactcgcacacactcgtgtcatccagatgtgagcaccgcacccagcggcaaagagccctcccccctgcagggctccacccatcaccctccctccgtctgtctttccggcctggaccccaccctccacactctcaggccatcacagaacaccccagcttcctcattctgctacaacacccaggccctctggacatccagaaaaccaagtgtccggatggcaggggccagcggccaccaagctcatgggacacccagagcagaagctagggcagagccaatgctgagggagcctcgacttccggcgccgccgccctctcccggcatccgcagagccagctgacgccctccctgcctcccagggcagctggccagcctcgggcagcgcggccccctcctcccaggggagagtagaagtcgcacacgcagcagagcagacctgatgtcccggtgcttcctggcccctcagctccagtgattcacgcccgcctggagaagaatcagagctcagctcatgactcacccatggcaggcggagggtcccagaggggctgagtcctcaaatccggctgaggcagcagctggcaccatcagagccaggagagtgacaacaggtctcaaggttcccacaaagtctttgctgctgtgctgggcaccacccacccctcaccttgcaggctgcctgcgtgggaggcgaagtcccaggacagcccagaggggggctacagagaggagtcggctgcagcagagggcaggagccccagcttagccctgagcgccagcgcgaggaccagggcctgccactaagcccgccccgctggccgccagctgcccgtccccagagccactgcagcaggagtcgggccctgcctccctcccagcagggaaaccccgcccgctgccaggccatcctctctgccagaggctttcatgagccccaaggctggggccacagctcctacccctgcccagcagccctgagctcagctgcaggaaggacatcccagaagccatggctcctggggcgcttccaggcattctgccctgccccgacaccagaaccctggtgctggtgggccactagcgtctgcagcctaagcaggtgctggctcagggttcatcgttctgccttgtccactgggggaccagccctgcagaccactctgacaagtcttcagcccacaccctgccagccccacagattttatttttgcacataagccataaccaatcctcaaggctggcacaggctttggggaagccctggagcctgtgaagaccctggaaacctcatgaggctgtggccaacccctgccccttgccccacacagaccaggccttaaatgtcggtccaggccctgtgcaccttaccccagagacagactctttttgtaagattttgttaataaaacactgaaacttc

SEQ ID NO: 6 - DNA, 1665 bp, Mus musculus
aggggccagcccagggtccccagcccgcctgccacacccagcctgtggcttttgccaactaggacttgagctggggctgactcccaaagggatgccctgtccagccagacatctactcacccactgacctggcctgactcacaactgccacacaaccatgctacatggactgaacatcaagaagcccctttcccatagggctcccacctgccgcctacccctcatctgtctgccctggtcctggcccccagccccattggcctcaccctctacactctcagaccatcacagaacacgatctggcttcctcattctgctccagtgtccagggctctttgggtaatcaagaaaccaagtgtctgaaaggcaacaaaaagtaggcaccaaaacccaggggacatcctagggcagatgctaaagcagagatgctgagggaacctcaacttccggggatgcagcccactcctgcagacacagcagatccagctggtaccctagctgccgcccagggcaaccggccagtcttgggcagcatagctcccctcccaggggtgagctgaagccacaaatgcagctgaagcagcagacctgacatcctggcacctcctggcccccagtgattcataccagtgaagaagagcagagctcagctccgtgactcagccatggcaggcggagggtccccgaggggctgagtcctcacacccagccgaggcagcggctggagcctacagagccaggagaatgacaccaggtctcaaggctgctgagaagtctttgctgccatgtctggaaagggcatcaccacaccaccagcaccagcaccatcctctcttctcctgaagctgcctacatgggttccaagacactttcaaggcagagaaaacaagattacagagaggaggtgcctggcagggggcagcaccccagctcagcccaagagctgaaggtgaagacaagccagcatgaaaccacgggtctgccatgatgcccgccccgctggccgctcactagctgcctgccattagcctctgcagcttgagcagggtctgtacccttggtcctcttggcacagagcccagctcgctgcatggcctttggctccccgaccagacccttgcaggagccttaaggcttgggcccctgcccagcctgatctttcctgctgtgccctgcctgccaggtcaagcccagtcccaggagaccccaggccttggctcctaggctgttccatgaacctccctgacctgcctggtgattgcccagctgaaacctcagccaagccccagctccaattaccttgtgctggtagctgcttgtgtctgcagtctgagtaggccttgttgcggttcctccatctgcctggtctattggtgttctgagaccaattccactgatgttctgacagatcctccaccctgtgcccctgccagcccccacaagtttatttttgcacaaaagccatgacccatactcatttggctggcatagggtgtgtaggtaggccctggggactagggagaccctggagatctcaagagagtgtggctatcccctattttcaccaagccttgaatatccagccaggctgtctgcccataccatcttacctcaaagacagatatatatctatatatgattttgttaataaaactatgaaactta

SEQ ID NO: 7 - DNA, 1619 bp, Rattus norvegicus
aggggccagcccagggtccccagcctgcctgccacacccagtctgtggcttttgtcaactaggacttgattgagctggggctgacacccaaggggatgccctgtccagccagacaccttctcacccactggcctgactcacaactgccacacaaccatgattcatggacatcaagaagcccctctcccatagggctcccacctgccacctacccctcacctgtctgccctagtcctggccctgtctccagtggcctcaccctctacactctcagaccatcagaacacctttggcttcctcattctgcatcagtgtccagggccctttgggtagtcaagaaatcaagtgtctgaaaggcaacgaaaagtaggcaccaaacccaaggggcatcccagggcagatgctaaagcagaatcagagatggccgaaggaacctctacttccggggatgcagcccgctcctacagacacagcagatccagctggtgccctacctgcctcccagagcaactggccagtcttgggcagcatagctcccctctcagggtgagctgaagcagcagacctgacgcgctggcgcctcctggcccccagcagtgattcataccagtgaagaaaagcagacttcggctccatgactcagccatgccaggtggagggtcccagaggggctgagtcctcacccccagctgaggcagcagctggagtcttcagagccaggagaacgacaccaggtctcaagctgctgagaagtctttccggccatgtctggaaggggtaccaccccagcaccagcaccgtcccctcctctcttgaagctgcctgcacagaggttccaagacactttcaaggcagagaaaataggattacaaagaggaggtgcctggcagagggcagcacccagctcagcctcagagctgaaggtgaagacaagccagcgtgaaaccccgggtctgccacgaatgcccgctccgctggccactcaccagctgcctgccacaagccactgcagcttgagcagggtctgtgccctctcagcacagagcccagttcgctgcgtggcctttggcccccgccagaaccttgcaggagccttaaggttcgggccctagcccagcctgaccttacctgctgtgccctgcctgccggtcaagtccagtcccaggagaccccatgccttggctcctaggctgttccaggcacttccctgacctgccgggtgattgcccagctggaacctcatccacaccccagcaccaaccacctcgtgttggtaactgctcgtgtctgcagtctgagtaggccatgttgaggttcctccatctgcctggtccattggtgttctgagaccagttccactgctgttctgacagatcccccaccctgtgcccctgccagcccccacaggtttatttttgcacataaaccatgacccatactaatttggctagctctggggactagggagaccctggagatctcaagagtgtggctatcccctattttcaccaagccttcaatatccagccaggccatctgcccacaccatcttacctcaaagacagacatatatatatatatacatatatatgattttgttaataaaactatgaaattta

SEQ ID NO: 8 - DNA, 1509 bp, Drosophila melanogaster
gcgacaaaaagaacatcaaataccaacaggcagcagccaacgtcattgatgacctcatcgctgctgccgcccacccaaacagaacttttcgtagcctcgccagccgatcgacgtcagagagagcccaacaaccggagagctggagatggggagcagccacatcaacagcagcaacagcagccacatctcttcatactcttcatactcactggcaatcggcgtgccggtaagcctcgactagcttctgaaatccacaaatccacgctgtttgtattgctattcgcaatgcctcgaaaacggctctattttcatataatttcacgccgacttgcggctactttggcacagaacgccagcttttggaaagcaataatttttattgcaacattgaacctttatttgcaactagaaactagatttcgagaatcatcgggcggggcggctgaggatctggcatttcgtccgtaagatcggttattcgcaatggaggaatatgatattcgaaccaaatggcgggtgaagtgcctcggcatggagctccattttcttcgaatcttatgttttgacattgcgagtctgaaatggatgttgcctgatctccagccgccccgcacaaccgttgattctcacaaccgccggctccactttgtgccggtcagcggagaaaaagcgattatttggctatcaaaagatatgatcactgtgttgagagacatggcaatcatcgctattgtaaccatatatttgctgatttttcgtctgatcctggtcctttgtgaagctagcaaaaaaccccccgcccggtgaatgcccacttagatccttttgcaggaggatttcgacggccctgaaggtgggcgccacccgtttccggtagcggcttcggctgcttccggtttccggtgtcgcaacccttcgcgatgtcccccgtgcgagtggagctacagtgggcgtgagccgggcaaaacctaaatttcttcggagatttaaaaaaccaacaaattttttgacttttgtcaaaacaattcgaacccacatagcactacgatggctaacgattcgccatccgtgcggttggcacgccaaaactgtctcttcgagatcacgggcctagggctgtttaacattcgacccaagcgatttcgcgacaggcttcggcacgccagtatataacccaaaacacacaaacgtcaggggctggaacgcgtcactgccgtgctcctccagccggcacagtcattccccgcccccacaccaagcaaaaccggccgcttgtgcagatgacataggcgcgaccagccaactgacccggctgaccagacttgcaccgtgcgccatcaactggaatcttggccacaagcacagcaatagtttggcccgctattcccacacagaaacccagagtgggggcctatggaagaccacaagtggttgcgtggaactgctaaaaatataaaactgtaaaactaaagactgaaactagaaaacaaccattaaactcagaaacgg

SEQ ID NO: 9 - DNA, 1191 bp, Homo sapiens
atggagctggaccaccggaccagcggcgggctccacgcctaccccgggccgcggggcgggcaggtggccaagcccaacgtgatcctgcagatcgggaagtgccgggccgagatgctggagcacgtgcggcggacgcaccggcacctgctggccgaggtgtccaagcaggtggagcgcgagctgaaggggctgcaccggtcggtcgggaagctggagagcaacctggacggctacgtgcccacgagcgactcgcagcgctggaagaagtccatcaaggcctgcctgtgccgctgccaggagaccatcgccaacctggagcgctgggtcaagcgcgagatgcacgtgtggcgcgaggtgttctaccgcctggagcgctgggccgaccgcctggagtccacgggcggcaagtacccggtgggcagcgagtcagcccgccacaccgtttccgtgggcgtggggggtcccgagagctactgccacgaggcagacggctacgactacaccgtcagcccctacgccatcaccccgcccccagccgctggcgagctgcccgggcaggagcccgccgaggcccagcagtaccagccgtgggtccccggcgaggacgggcagcccagccccggcgtggacacgcagatcttcgaggaccctcgagagttcctgagccacctagaggagtacttgcggcaggtgggcggctctgaggagtactggctgtcccagatccagaatcacatgaacgggccggccaagaagtggtgggagttcaagcagggctccgtgaagaactgggtggagttcaagaaggagttcctgcagtacagcgagggcacgctgtcccgagaggccatccagcgcgagctggacctgccgcagaagcagggcgagccgctggaccagttcctgtggcgcaagcgggacctgtaccagacgctctacgtggacgcggacgaggaggagatcatccagtacgtggtgggcaccctgcagcccaagctcaagcgtttcctgcgccaccccctgcccaagaccctggagcagctcatccagaggggcatggaggtgcaggatgacctggagcaggcggccgagccggccggcccccacctcccggtggaggatgaggcggagaccctcacgcccgcccccaacagcgagtccgtggccagtgaccggacccagcccgagtag

SEQ ID NO: 10 - DNA, 1191 bp, Mus musculus
atggagctggaccatatgaccaccggcggcctccacgcctaccctgccccgcggggtgggccggccgccaaacccaatgtgatcctgcagattggtaagtgccgagctgagatgctggaacacgtacggaggacccaccggcatctgttgaccgaagtgtccaagcaggtggagcgagagctgaaagggttgcacaggtcggtgggcaagctggagaacaacttggacggctacgtgcccaccggcgactcacagcgctggaagaagtccatcaaggcctgtctttgccgctgccaggagaccatcgccaacctggagcgctgggtcaagcgtgagatgcacgtgtggagggaggtcttctaccgtctggagaggtgggctgaccgcctggagtccatgggcggcaaatacccagtgggcagcgagccggcccgccacactgtctctgtaggtgtggggggtccagagccctactgccaggaagctgatggctatgactataccgttagcccctatgccatcaccccgccacctgccgcaggagaactgcctgaacaggagtcagttgaggctcagcaatatcagtcttgggggccaggtgaggatgggcaaccgagccctggtgtggatacacagatcttcgaggacccacgggagttcctgagccacctggaagagtacctgcggcaggtgggtggctctgaagaatattggctgtcccagatccagaaccacatgaatgggccagccaagaagtggtgggagttcaagcagggctcggtgaagaactgggtggagttcaagaaggagtttctgcaatacagtgagggtacactctcccgtgaagccattcagcgggagctggagctgccgcagaagcagggtgaaccactcgaccagttcctctggcgcaagcgggacctgtaccagacactgtatgtggacgctgaggaggaggagatcattcagtatgtggtgggcaccctgcagcccaaactcaagcgctttctgcgccacccactccccaagaccctggagcagcttatccagaggggtatggaagtgcaggacggcctggagcaggcagctgagccttctggcaccccactgcccacagaggatgagacggaggcactcacacctgctcttaccagcgagtcagtagccagtgacaggacccagcctgaatag

SEQ ID NO: 11 - DNA, 1191 bp, Rattus norvegicus
atggagctggaccatatgacgaccggcggcctccacgcctaccctgccccgcggggtgggccggccgccaaacccaatgtgatcctgcagattggtaagtgccgagctgagatgctggagcacgtacggaggacccaccggcatctgttgaccgaagtgtccaagcaggtggagcgagagctgaaagggttgcacaggtcggtgggcaagctggagaacaacttggacggctatgtgcccacgggcgactcacagcgctggaagaagtccatcaaggcctgtctctgccgctgccaggagaccatcgccaacctggagcgctgggtcaagcgtgagatgcacgtgtggagggaggtcttctaccgtctggagaggtgggccgaccgcctggagtccatgggcggcaagtacccagtgggcagcgagccggcccgccacactgtctctgtaggtgtggggggtccagagccctactgccaggaagctgatggctacgactacactgttagcccctatgccatcaccccgccacctgccgcaggagagctgcctgagcaggagtcagttggggctcagcaataccagtcttgggtgccaggtgaggatgggcaaccaagcccaggtgtggatacccagatctttgaggacccacgggagttcctgagccacctggaagagtacctgcggcaggtgggtggctctgaagaatattggctgtcccagatccagaaccacatgaatgggccagccaagaagtggtgggagttcaaacagggctcggtgaagaactgggtggagttcaagaaggagtttctgcagtacagtgagggtacgctctcccgcgaagccattcagcgggagctggacctgccacagaagcagggtgagccacttgaccagttcctctggcgtaagcgggacctgtaccagacactgtatgtggacgctgaggaggaggagatcattcagtatgtggtgggcaccctgcagcccaagttcaagcgctttctgcgccacccactccccaagaccctggagcagctcatccagaggggcatggaagttcaggacggcctggagcaggcagctgagccttctgtcacccctctgcccacagaggatgagactgaggcactcacgcctgctcttaccagcgagtcagtagccagtgacaggacccagcctgaatag

SEQ ID NO: 12 - DNA, 765 bp, Drosophila melanogaster
atggcccagcttacacagatgaccaacgagcagctccgcgagctgatcgaagctgtaagagcggccgccgtgggcgccgccggaagtgcagcagcagccggaggagcagacgccagcagaggcaaaggcaacttctccgcttgcacacacagcttcggcggaacccgcgaccacgacgtggtcgaggagttcatcggcaacatcgagacatacaaggatgtagaaggtatcagcgacgagaacgccctgaagggcatctcgctgctgttctacggtatggccagcacctggtggcaaggcgtccgcaaggaggccaccacgtggaaggaagccatcgctctcatccgcgaacacttctcgcccaccaagcccgcctaccagatctacatggaattcttccaaaacaagcaggacgaccatgaccccattgacaccttcgtcatccagaagcgagcgctgctggcccagctgcccagcggtcgccacgacgaggaaacggaactggatcttctgttcggtctgctgaacatcaagtaccgcaagcacatctcccgccacagtgtccataccttcaaggatctcctggaacagggccgcatcatcgagcacaacaaccaggaggacgaggaacagcttgccacagcaaagaacacccgtggctccaagcgcaccacccgctgcacctactgcagtttccgggggcacaccttcgacaactgccgtaagcgccagaaggatcggcaggaggagcagcacgaggagtag

SEQ ID NO: 13 - protein, 396 aa, Homo sapiens
MELDHRTSGGLHAYPGPRGGQVAKPNVILQIGKCRAEMLEHVRRTHRHLLAEVSKQVERELKGLHRSVGKLESNLDGYVPTSDSQRWKKSIKACLCRCQETIANLERWVKREMHVWREVFYRLERWADRLESTGGKYPVGSESARHTVSVGVGGPESYCHEADGYDYTVSPYAITPPPAAGELPGQEPAEAQQYQPWVPGEDGQPSPGVDTQIFEDPREFLSHLEEYLRQVGGSEEYWLSQIQNHMNGPAKKWWEFKQGSVKNWVEFKKEFLQYSEGTLSREAIQRELDLPQKQGEPLDQFLWRKRDLYQTLYVDADEEEIIQYVVGTLQPKLKRFLRHPLPKTLEQLIQRGMEVQDDLEQAAEPAGPHLPVEDEAETLTPAPNSESVASDRTQPE

SEQ ID NO: 14 - protein, 396 aa, Mus musculus
MELDHMTTGGLHAYPAPRGGPAAKPNVILQIGKCRAEMLEHVRRTHRHLLTEVSKQVERELKGLHRSVGKLENNLDGYVPTGDSQRWKKSIKACLCRCQETIANLERWVKREMHVWREVFYRLERWADRLESMGGKYPVGSEPARHTVSVGVGGPEPYCQEADGYDYTVSPYAITPPPAAGELPEQESVEAQQYQSWGPGEDGQPSPGVDTQIFEDPREFLSHLEEYLRQVGGSEEYWLSQIQNHMNGPAKKWWEFKQGSVKNWVEFKKEFLQYSEGTLSREAIQRELELPQKQGEPLDQFLWRKRDLYQTLYVDAEEEEIIQYVVGTLQPKLKRFLRHPLPKTLEQLIQRGMEVQDGLEQAAEPSGTPLPTEDETEALTPALTSESVASDRTQPE

SEQ ID NO: 15 - protein, 396 aa, Rattus norvegicus
MELDHMTTGGLHAYPAPRGGPAAKPNVILQIGKCRAEMLEHVRRTHRHLLTEVSKQVERELKGLHRSVGKLENNLDGYVPTGDSQRWKKSIKACLCRCQETIANLERWVKREMHVWREVFYRLERWADRLESMGGKYPVGSEPARHTVSVGVGGPEPYCQEADGYDYTVSPYAITPPPAAGELPEQESVGAQQYQSWVPGEDGQPSPGVDTQIFEDPREFLSHLEEYLRQVGGSEEYWLSQIQNHMNGPAKKWWEFKQGSVKNWVEFKKEFLQYSEGTLSREAIQRELDLPQKQGEPLDQFLWRKRDLYQTLYVDAEEEEIIQYVVGTLQPKFKRFLRHPLPKTLEQLIQRGMEVQDGLEQAAEPSVTPLPTEDETEALTPALTSESVASDRTQPE

SEQ ID NO: 16 - protein, 254 aa, Drosophila melanogaster
MAQLTQMTNEQLRELIEAVRAAAVGAAGSAAAAGGADASRGKGNFSACTHSFGGTRDHDVVEEFIGNIETYKDVEGISDENALKGISLLFYGMASTWWQGVRKEATTWKEAIALIREHFSPTKPAYQIYMEFFQNKQDDHDPIDTFVIQKRALLAQLPSGRHDEETELDLLFGLLNIKYRKHISRHSVHTFKDLLEQGRIIEHNNQEDEEQLATAKNTRGSKRTTRCTYCSFRGHTFDNCRKRQKDRQEEQHEE

SEQ ID NO: 17 - DNA, 6189 bp, Gallus gallus
ggcagttcagacagggaagagaagcagagctcttcgcatctctaccgaaagcagttttgtctcgacaagtttaccggagaagaaatcatcaggattttttttttcctttttttttttcttctttttttttttattgcagcactaacagcttccagcttctgtgagcatcgctgtgtgtttcaacgagcggggactgtgcgctgttcgagattctcagctacagacaagcaggtagcgggcacgcgtttggggtcttagccaactcctctccttgtgctcctgaaggatcctggctctctctgggacactctgagcacgtgagaccggcatttccaggaggagaaatttgcctccaactctctctgcgatccacggggactgaacagctcgctctgcggtgatatctgatttggttgtgtttgtgtctaaaagtcctttgaggggggtttagaagtctctgtgtgttgtttgggaagtgctgtgttgaggtttttaggagcaggctctagggccagggcttataacccagttctgtctgtgttccatactcatacagtaggagtcatgcagctggacaatgtcaccaatgcgggcatccactccttccaggggcaccgtggagtggccaacaagcccaacgtgatcctacagatagggaaatgcagggcggaaatgttggagcatgtcaggaggacccaccggcacctcctgtccgaagtctccaagcaggtagagcgcgagctgaaaggtttgcagaaatcagtggggaagttagagaataacttagaggaccatgtgccaactgataatcagagatggaagaagtccatcaaggcctgcctggccaggtgtcaggagaccattgctcatctggagaggtgggtcaagagagagatgaatgtttggaaggaggtctttttccgtctggagaaatgggcggaccgtctggagtctatgggaggcaaatattgtcctggggagcacggcaagcagaccgtgtctgttggggtgggaggcccagagataaggccaagtgagggggagatatatgattatgcccttgatatgagccaaatgtatgcactgacccctgctcctggggaagtgcccagcatcccccaggcccatgattcctaccagtgggtctctgtgtcagaggatgctccagcatccccagtggagactcagatctttgaggatccccatgagtttctgagccacttggaggagtacttaaagcaggtgggtgggacagaggagtactggctgtctcagatccaaaaccatatgaacggtccagctaaaaagtggtgggagtacaagcaggactctgtcaagaactgggttgagttcaagaaagagttcctgcagtacagcgaggggactctgacaagggatgctatcaaaagggagctggatctaccccagaaagagggagagcccctggaccagttcctctggcgcaagagagacctgtatcagaccctctatgttgatgcagatgaggaggagattattcagtacgtggtaggaaccctccagcccaaactgaagcgcttcttgagctaccccttgcccaagaccttagagcagctgattcaaagagggaaggaagtccaaggcaacatggaccactcagaagagcccagcccacagaggacccctgagattcagtctggggactctgtagagagcatgcctccctccaccactgccagtcctgtgccaagcaatggcacacaacccgagccccctagcccaccagctactgtcatatgagttagctggatggagacggcaatctggattacatgaaagggagaaaagggcatatttaggaagcttctgctcaaagagaggttctggctgagacatgacatgaggtgtgctcagtccaacagcccatagcaaaggaattaactttgcttgtggggggagggtggtgaagggggagaggcaccttaggatgtggttgcccacctcacatgagccatgcaatccagtggtgctggagatgctacttgcaccactgcggggaatggactattttataagacccatgacaagaaactagagacaattccccaaattcagaagcagttgcttggcactggcggctttcaaggacttcatatgagcgcagctattggctgagggttcctacccatctggatctcttctccttctcccctctctcttctgaagaggtgtccttgttctgagagaacatccttcttttgacccttgcccatttctggtttaccactgggcttctgtttacttgacagtctcctattctatcctgatctaaaggattaaagaatgttttatttttaaaaatttgtttatttaaggagaaatcctatgacttcatgaaatgaaaacttcaaggatttggataatttttagtggttttaatcctactgcacctaacacctgctttagtgcttttgctcccaagagaacagtttactccttatcttagtttctgttcactcaaatcaaggtcactgcagtgcagaagcaaatttcatcctttctctgcacattgtactgtgcattcagcagtaaatagagtttcagattaaattctgagttcatttattgaaaggagaatgtgtctcccttcagagaagggagagcgtcaaggtggagagagaaaacagtagagagattttagtggatgggaggggagggggggggttaagggaaataaatccttatattttgaatgaaacaaacaaacacatcctaaatccagagcaaaatatccccagagcagcaaatcatgtccatgctgatgagtggagacaacaggaacttctgccatataaaagcaaaacaaagtgaaaagaggagctgtatgtcccagcacaggctcaacctgtgcatcgtaaagaagaacttctgctttaacagacagactcagaatactctaggaaagtctggcacctctgtcccggagcacctgaggacaaagcattgtctgctcacacagaactactacagcagtccctttgccatggatggaggcaggcttagacttggtgacattttccatgtggagacagcaatgctcagccttcacctcgctttgaccgatgcctgatgataggagttagagatgaaattgctgtgagaatgatgaaatttggctctttgaagcttctcaaggctggacacatctcaagcatcatctgcattcatcaccagaccaaataagaaacgtctctgcaaggagatacagcagtgatgcagcaacaggagtgcccctgggatgttcctggcactgcagcagcagcagcaacagtggcttggaagacctttggcttgcttccttccaagaggctgaaggtaggacaactttctgacattgttctgtctgcattccttacaccaaagttagcctgtccagtgggagccttactctgaaataaatgggatgtagaacactgtgaatggcaaggtagagcttggaggaaaagaagggggggacatccaaggggaaataaaggacagtgaaaaggaaaagtttccaaacacaacaatcttacatactcctattaaatggggagtgagtgggaaggatctgccccatgaagttctgggcttgagtgcccagctgtgacaacacatcacaggtccatacacagcccaaagtggatgcatatcttttctgcacacttgcctagttctaagtctgttaggaggctctcctctaacttgtttagagtgaatttgtctgcagtggctgtgtctgtggagagaaatgagcagttcttactaatgacctggaatgggtgatggaggagtgggtgtcgctgctgaggatgagctggccatgcattacaagcattatcttctcttgattacagtgactcactcagatcctcctctgggaagaaatcacaatacttaagactcagaaggaaagccaaagggaaaagacttcaaaaccaatgattcaacatgggacctgctgccaggatccccagccacccagtgccagatccactgtctgaatgaaagcctggcacaggtaattacttcttttaattttttattcttatgggcctttcttagcctctccataccctttctcaagatattgaatagcccaggtgcaaatatctgtgctggacctcagacctaatggtcacaagggtctatcatcaccagatagtgggatttcagctgcttgatttgcaaacacaagcatcagtcccagtgattaatgcagtgggagtggtgtatgtcctgccatcctttcttctggaccactggcaaatgcttaaatcaaaatgcctaatgggacttccagcccttgagcatctggtgggcacggctgattattaacccatctcctgagaaatcccttgtactcaccactttggaaatctaacctgagctgtatcatcttttttctttcagagattcctgctgcgcctgttactgagtttcctcctctgtgcccaagagtcacgtcttcccaggtgataagcaagcactgctagaagagggtaaagtgtgcaccaaagagcctctcatgcagtgcaatgccatactcaagatgctgagagcctgagtgaaagatggagccacttccaagaggatgaagaaaaggctgagctggtccagctagtccacatgcagaagaaagtgttgagaaagagaaaccaagaggaagaacaaaagagccaaatctgggctttgaggacagcaaggatgctggacttgtagtgactgtctgttgagatgataccatacctctgccatctggggccactgagaaatcttcactggattatcagttagaaaaaactttcctgattaactttgccaaatgactgaccctacacaggctacgaaccctccatgctctcaaggctgtaactcatttttcctgagttgagggtcgcttcatttcatgcgggtatcagttttcaaacctcaaacagctctggaggttcggagaagcatcctggagttcagatgcttgtctgaactacttgagtttgcacaacagggccagctgtcttgccaaaagggacactcttgtgagacagcaggcacttcctggatctgcatgggccagagttactgcaagaactggggttcttgtgttggctttggtgtggctgcttccatccagacccagggagtgcaaaaggtgcatgaaagacaacgtgtgaattgaaccaagcctttttgcaagacagtttggttcacatctcatttgaaaggatccagttggttcctctctcttccagagccaactgtcctgggtatgtgtgtgtgtgtgtcagtgtgggtgtgtatgttttgagccaacaaatctacttaaccaaattctgggttgttctgttgtgtttaaactaagccaatggaacttaatgtgcattccaacattgctcaacaaaaatgtccaggactagaaaattatgtgaaaacatgtaaaagtcaacttggtaggcatcatcccaaggtcaatatgaagtttgattttgaggtgcttagtttctacagtctttctcaagggacctaactgcctcaataagcattttctatatccatagactttccaatgaattagcctgcctgttctacttgatttggtcctgagctttatacattttgaactgactttgtggaatgtgcacaagtgaatatccttggctgattttatttcagttattgctcctagctgactggagctttacttgtagcaccctggtttatattaccagcttctccaggaaggactggtagtttgtttcgctggggcaaagtcatgtgaatgaagaagtgtgtatgtgttgtgcctgtgaaactttagcgaatttcaacgactggatttttgttccttaggcaattttacatctgattctgacaaaactaccttagagtttttatttttactagaaatattattaattcaaacaaccttgtacaaaaggcaaacacattgaatcactgcaggttataggggttgaagccaaaggtctttgtaagccgacatcacttgccctagatctgactgtatcagacagcttattcctcacatgttatgttggagttacaagatcacaccaagccactagaacctgtcaatagaatagtgctacactttatttgctattgtagcaaagccttttgtagatttatacaataaaattttgaaatacctgc

SEQ ID NO: 18 - DNA, 4544 bp, Xenopus borealis
cacaacgcaagcagatagaaagtatttcttctattcgggttccgaagagccggcttcaaagggaatctcctcaacctccgacttcttcctttgcctgaaatacttgggaattttcctaactctgccgaggctgaaatcggaaagaatttctttgctggaagactttgctttatttcgaccagtttctgatttctgccacttccatctactgacatttctgcaggtgaaggactcactttgcttttcgaatttctgaaggaactcttgggtgatctataactttctatttcattctatttcctgatctatttcactcattgagagcagttgttttatgtgctgtaaactttcctgtttatctgaaatctgatgcacaacttattttatattgcataaaaatgctcttagcttattgatatcatttaaaagaattgctaaacttaaatagtgaggtgacactgaaatatctttgattgagattttaatcaagttatagcattcattgtcacttattgttaaactttgaatctaactatggctataactatggctgctagtggaatgcttgttcctaccctgtctaatcctgagcaaactgtggctcttcagataggaacttgtagcccagcagaaatgttggacagggtcagaaagacacaggtctatatcctatcgggggtttctagacaggttgagagtgagctgaaaggttttaaaaggtcggtgatgaggttaaatgccaacatgactgatgaagccccagcagtaggcatacgaagatggaagcgttccataaaggcttgtttaatgaggtgccaagataccttggtgaatttagaaaggtgggtcaaaagagagatgaattcctggagagatgtgttttctcgttttgaaaaaatggtcagcaaaacagaccaggctgtatacagggccagtaagatagatgaaaaaccaagaaggtttttccaaggctttggatttttaggtgataaaaagaaagaagcagagttatcccaagacattgtagatccatatgctcccagcccaaaaaaggaatgtgaaccacatgaatgggtagtcatttctgtcgatattctctcccctccagagtttgatgccaatatgtcagaagatcctagggagttcattgtcaacctggagaaatacttcaagcgtagtggctgggatgaaaaagtttggctatcccaggttgacaatcacttgaaaggagcagctaagaagtggtgggagtatagaaaggagaccatagacagctggcatgatttcaaagtagccttcttgcagtactgtgagaggcttttggttagagaggccatcaaacgggacttagatctcccccaaagacgctgggagccctttgagcagtttgtatggaagaaaagggcactgtaccacaggctttacgtagacgccaatgaggaagaaatgattcgctacattattagcaccctgcaccctgagatcaggcgtttcttaaaacccccatttcccaagactgtggaggatttagtccagatggggaaagaaatccagtttgaatttgagcagtcagagaaacaaaccctcaaggcagcttactcagatgagcaaattagtaccaagctgaaggtgacagtcaccaaggacccttatgatagcaacagtgtttgtactgagaaaatgtaattcagacatatatgatccatcagggaaacatggaggaaccttctaaaagttgaaactttatcaactttgaaagaatgaatggctggcaagtgagtaatatttaaaaggcctgaactgagtttaaacttcagaactgtaactgaagttataggagaaggtagaaagagccagagaagttagtagctttagggaaaaagttacttattcagttactcttaacctatggcaatagctattgtgaagttacaacatcttttcttatttagaaacatcattgttgcccatctcttttccaccatttggcagaaagagaaagagccaatgatatgtcttctagctaaccatcacttacagctaaacagaatccataattaagctaatgccattagaacaccatgtctatatttttgactttttgcttcgacacagctatctatggaaagcaaaaattgcagtttgtcaccagaacccagtgtcatttgactgtgggatagagctataaactaactgacaacccaagttgaccattgaattggttggctgtaagtgacagttggaaggtgtgttcccttataagagcatttttatgacaaatcctatgtatggtgtaacaaacaatgtaataagtttgataataagcactgaagttactttatttttattgtataacatatactgcaatatctgcaatgtactataaatagcaattcctaaactatttgtgtatgtgtaaaagttgttacaagcaataatgcacaactataaccttatatcgtacatggcaaacctatggcctgcaatattgttgttgtaatacaactttaagcaaaagtaaattacagctcaagggccaaagggggttggagacacctgccttacagatcaatgttgtgataaacttgtaaccttgaatctcaaacagttcttatcaatattgtatagagagtttcacattcttgcgtatattttataacagccattggttgatactgtactgtgtgtattttaaaagtgtacaaaatgtattttgataagatcaacgttattatgaactcttaggaaccaacaaaaaattgtgacttatttttggattgtctagaacttatctaattgaatgaatgtagcattttttaaaaaaagaagtgatattaaagcacaggaaagtgaacatgttatagataggaggtaccaccataccagctcttgggtggcctctctggagacatctagaacaataagaggcctacaaggctggaattgcttccacttggaaactgatgaactgttctgtaacttggatttaaagtcaaaaagtgttggactttgccataatttggaagcaaacagagacaaataaatcttaccaggcatcttctgtacctaccaagtagatatgtatggcctgcaatcaaagtttttggctatgccaactgatcatactgtataggttgccctgtaatacaaaagtagggctttgtggaatgtaggaacaatcctcaactcaggaatacctatgattctattgaaataatcgagcaacatacctgcagctacaaagacttaaggctcaatgaaaagagcaacaaaatggacaaagtcctgtcaaggcacaacaccctctggagagaactagactggcaccctgcttgaaaggcatcgataatcagcattctgaatcgaattccatgttggaaagatatcgggtctgggtagtcaggctgctacacaagaggccttcataataccactgtaagttcatataataatatgtatataactattaaatcagagcacttagatcactttgttattcagaaatagtcaacctagcatgtatataaacgtttagagatttattacatattatagctttcattatgtgcaggatgcagccttactttaaagctctactgcttgggctgcatggccaacattgttacccttgctaaggcatatttgtattataggtcttgtcttagaaatgacaatgattaggcataattctccctgtggtgtttatgaagcataccagctgtcagcctattgctgtagatgagcaatagttctaccataaatggaacaggaggccattgcaggcagttagttttcatgtacagaattggtttgtagagtagcatagagtgtgttaataatgctactgtagaataaataaataaacttatttgcccttctttctctattttgcagatcagagataaagtacatggaccttggcatccaaaaaagtctacaatgaccaacagagctatattgactccactgtccaggtgtctaaaatttgcaatgatgtaacagaaatggcttttctggaggatcagaagaaaaaatacatatatttgaacactgaccatgaaatatccaagcgtcccaaggggtctgttccagacatgaatgacagttaaagttgctcggtctctccatatctccaacaacgtactccaaacgtctaatagatgacaagtgactttgtgatgctacattccctgcagttgacctaaaaaagccaatattaagaaaatgtacatttctcttctttgcaagtacatgaaaatgtattatgtaccaagatggtctatttctcaattagaaaaaaaacattgggtatcagtaattggtcttggcaacacagccaggactatttcagtgcttatgggtaaaaaacagctgaggagtgattttgccattgctgctgaccgagacggtattcataatcgttaggaactgtctctttgtatacgttgcattttattccaaagaaaaacgacagcattaaatattgaatgatgtatttataaaggaacaaagtatttggttaataaaatatgaaacacatcctc

SEQ ID NO: 19 - DNA, 6223 bp, Taeniopygia guttata
tagtggcagatcagacaggggaggagaagcagctctttgcatctccagtgaaagcgggttttgactcacctagtttgcccgaggagaaatcacccggatttttgctgcagcttccagcttctttgtgcatctctgtgattctctccggcggggactttgcggcgctccagattcccggcgggattggacatcctatccaactcctctccctgttcctggaggatcctggttctctctgggacgcccctgaacacgtgagaccggcgtttccagcttggcaccgggagaaatttgcctacaactctctctgggatccacgtggaccgaccggctcgctctgcggtgatatctgactgggttgtgtttgtgtccaaaagtccttggagtggggtttagaagtctctgtgtgtctttcaggcagtgttgtggtgggggcttttgggatccagctttagtgccagggcttataacccagttctttccgtgtttgccactcgcacggtcggagccatgcagctggacaacgtcaccagcgcgggcgtccactccttccaggggcaccgtggggtggccaacaagcccaatgtgatcctgcagatagggaagtgcagggcagaaatgctggagcatgtccggaggacccaccggcacctcctgacagaggtctccaagcaggtggagcgggagctgaagggattgcagaaatccgtggggaagttggagaacaacttagaggaccacgtcccaactgaaaaccagagatggaagaagtccatcaaggcctgcctgatcaggtgccaggagaccattgcccacctggagaggtgggtcaagagggagatgaatgtttggaaggaggtctttttccgcctggaaaagtgggctgaccgcctggagtccatgggaggcaaatactgccctggggagcagggcaagcagacggtgtctgtcggggtgggaggcccagagataaggccaagtgagggggagatttatgattatgccctggacatgagccagatgtatgccctgacccctcctcccggagaggtgcccagcatcccccagggccacgattcctaccagtgggtctccgtgtcagaggacgctccagcctccccggtggagacccaggtgtttgaggatccccgggagttcttgagccacttggaggaatacttaaagcaggtgggtggaacagaggagtattggctgtctcagatccaaaaccacatgaacggcccagctaaaaagtggtgggagtacaagcaggactccgtcaaaaactgggtcgaattcaagaaggagttcctgcagtacagcgagggaactctgactagggatgcgatcaaaagggagctggatttgccccagaaagagggggagcccctggatcagttcctctggcgcaagagagacctgtaccagaccctctatgtggatgcagatgaggaggagatcatccagtacgtggtaggcaccctccagcccaaactgaagcgtttcctgagctaccccctgcccaagaccttagagcagctgatccagagggggaaggaagcccaaggcaacatggagcactctgaggagcccagcccacagaggacccctgaggttcagccaggagactccgtggagaccgtgcccccctcaaccaccgccagtcccgtgccgagcaacgggactcaaccagagccccccagccccccagccactgtcatatgagctcccccgaggggggtctgggttccgtggaagggagaagggggctaatttaggaagcttctccttggagggaagttctggctgagacgagacctgaggagtgctcagtccaacagcccagagcagaggggttggctttgctcctggggggagggaggtggtgtgggagaggcgccccaggatggggctgcccccctcacccaggccgtgccaagcagtggtgctggggaccctgctggcaccactgcggggaacagccaattttatgagaattccctgacaagaaactagagacaattcccaacttgtgaagcggcactggcagctctcaaggactttatacgagtgcagcagttgctggagggttcctacccatctggatctctctttttccttctctcctccctcctctgagggaggccctgtcctgaggagacagctttctttttgacccttgcctgtttttgattaacctctgggtttctgttcacttggcaatctcctgctcttacttgctccaaaggattaaagcaattttttggattattttttgttataagaagaaaaaaaaaaaacctgttatttcaggaactgaaagctttaaggatctggattattttctgtggtactcatttcactgcacctaatacctgctttaatgtgtttcctctcaagaggctcttactggtttacttcttgtcttagtttctgctcactctagttcaaggccactgcagtgcagaggcagatttcatcctttctctgcacattatcctgtgaattcagcaggaaacagattttctaattaaatgctgagctcatttattgtaggagcagctttcttcctttcagagaagaaagggtgttcaaggtagagagaggagacaccagagctctattgagagagactgggggggagggaagggaaataaatccttattctttgaatgaaacaaacaaacacaccctaaattcagagcaaaatatccccagagcagcaaatcgagtccatgctgatgtgtggagacaacaggagcttttgccatgtaaaagccaaaagaagtgaagagaggatctgtgtgccccagcccagttttagcctgtgcatggctgcaaggactttctgctcacacagacagactccaaatgctcctggaaagcctggcacccctgtcctggagcacctgaggacagagtgctgtctgctcacagagaaattcctgcaacatctcgccacagatggagatggacttggactttgtggcttcttccatgtttgagacaggaaacgctcagcactcacctttggccagtgtttgatgacaggactgagagaagaaggacattcctgaagtttggctctccaaagcttcctgaggctggacacatcttgggcatcatctgcatccaccaccagaccaaataaacagcagggatgcagcagcaggagtgaccctgggatgctcccggcactgccacagtggtgacatgtggccctggtggctcaggaggcctttgctgtgactccttccaagaggctgaaggtaaggcagctctctggcattctctcctcagagctaaactgtggatattctcagttcagtcagagagaaacagatgaagatttctgcaggctgagcctgggaaaaatctttctctgtttctctctgactgaactgagaatatccacactaaactggtcgtagaatgtcctgtagaaaacttgccctgggataaaaactcagatgaaatgggatatgaatcattggagttgggagaaaggggaagggagagacagcccgagggaaatacaggaaagggaaaagtttccaaagagggcagtatccctgatatcctatattaatcctttctgattaatgtggcaaaagaatgggaagcttcttaattagcccagccccaggacctgccttgtccttcatggagagcctctgggcttgagtccccacctgaggcagcacatttcaggtccttgcacagcccggaggagctgcaggtctgctctgcatccttgctgggagctggtctcgggaatggtgggagctctcctctcacttgttcccagtttgtcaacagctccgtgtgcagggaaaggagcatttctcactaatgacccgggctgagtgacgggggagtgggagtcactgctgaggatgagctggccgtgcattacaagctttgtctcctcttgcttccagtgactcactcagatcctcctctgagaaggaatcacttcgcagcatgcagcatttgggaggaaagccacagaaaaagctgcaaaacaaaggcctcaacatcagacctgctctcaggaccctcagccaccaacagccagatccaccacctgaaggaaacactggcacaggtaattacatcccatattaccttgtgggccttcctttatctccccagtgccctgagatattgaacagcccaggtgcaaacacctgtgctggtcttgaaacctcagtcccaggggttgcagcagcctggcaccacaagagaggtgaaatttcagctctttggtgtcagaaaccaagcaccagccccaataattgatgctccagggactgcacattgtggctttcccttggctggaccatgggcaaatccttagaccccaacagctggtgggtcctccagtctgcaggcacagcaaaatttaatcccagctccttagaatccccactttctacccacttcaaaaatctaatcatggtgcatttttttttttccttttccagcaatcccttgcggctgttgctgagattccttctctgtgtccaggagctttcccgggggagaagaaagtgctgcaggaagacagagggcaaatcatgcaccaaagagcctcccatgcagtgcaatgcaaacattcaaggtgctgagagccagaatgaagctgggaagctgcttccagcaggacagagaaaagcctgagctggtccaggtactccaagcacagaggaaagtgctgagaatggaaagagaggctggaacagaagaaccaagtccaggctttgggtacagcagggatactgactgtctgtggagagaattctgcacctctgcagtctggggctgctgggactcacctgaagaaatcttcactagaaagtgatcttcactgaaaaaaactttcctgattaactttgccgaggggctgatcctgccttggctacgaaccctccccgctggccgtgctgtaactcacctctcctgagtcctttcatgcgggtatcagttccaaacctcaaagggctcccggagtttggagaagcatcccaccgtccagatgcttgtctgaactgttggagcctgcacatctgggccagctgtcttgccagcaaggagcctcgtgagacagcaggcgctctctgggtctgcatgggccagagttactgcaagaactggggttcttgtgctggctttggagtgactgtttccatccagacccagggagcccaaaaagagctcgagtgagctggacaagacagttttggttcatctctcagccgaagaggtctagttggttcctctctcttccagagccaactgtcctgtgtgtgggtgtgggtgtgggtgtgggtgtgggggtgtgtgtgtgttgagcaaaaaaaaaaaatatccacattacttaaattctgtggtgttttgtttcatttgaattaagccagagggacctaaggcacattccaacaaggctcagcaaaaatgtccaggactggaaaattccataaaaccatgtaaaggcagattcccaggcattatcttaaggtctaaattatatttgattttgaggtgcttaatttccacagtctcttccaagggactagactgcctcaataggcattttatttttcctgctcttttagggaattagcctgtctgtgctacatttggtcctgagttttttacattttcagctggctttttggagtgtgcagaactgaatctcctggactgatttgatttcaattgctgctcccagcaaattggagctttacttgtagcaccctggtttttattaccagcctctccaggaaggactggtagtttattttcctggggcagagtcacgtgaatgagaagcgtggatgtgttgtacctctagaattttagcagatttcaaccactgcatttttttcctccctaggtgattttgcatttactgatgaaacaactttagagtttttatttttactagagatattattaattcaagcaaccttgtgcaaaaggcaaacacgttgaatcgctgcaggctgtaggggttgaagccaaaaggtctttgtaagccgacatcacctgccctggatctgactggatcaggcagtttattcctcatgtgtcatgttggagttacaagatcaccccaagccactagagcctgtggatagaatagtgctacactctatttgctattgtagcaaagccttttgtagatttatacaataaaactttgaaatatctgcttcaa

SEQ ID NO: 20 - DNA, 3472 bp, Macaca mulatta
aaagagccggcggcccggactcagcgcagagctcgggcgccgcgtcctccctccgcagcagcagagctggacctgcctctccgggcgcgctccaccagccccgccgccgggccgcagcgacagacaggcgctccccgcagctccacacgggacccaggccgccgggcaccgccgccggactccagcgccctccctccgtccgccccgaggagtttgtcgcctgcccgagcacctgcgcacagatggagctggaccaccggacaagcggcgggctccacgcctaccctgggccgcggggcgggcccgcggccaagcccaacgtgatcctgcagatcgggaagtgccgggcggagatgctagagcacgtgcggcggacgcaccggcacctgctgaccgaggtgtccaagcaggtggagcgcgagctgaaggggctgcaccggtcggtggggaagctggagagcaacctggacggctacgtgcccacgagcgactcgcagcgctggaagaagtccatcaaggcctgcctgtgccgctgccaggagaccatcgccaacctggagcgctgggtcaagcgtgagatgcacgtgtggcgcgaggtgttctaccgcctggagcgctgggccgaccgcctggagtctaccggtggcaagtacccggtgggcagcgagccggcccgccacaccgtctccgtgggcgtggggggtcctgagagctactgccacgaggcggacggctacgactacaccgtcagcccctacgccatcaccccgcccccagccgctggcgagctgcccggacaggagcccgccgaggcccagcagtaccagccatgggtccccggcgaggacgggcagcccagccctggcgtggacacacagatcttcgaggaccctagagaattcctgagccacctggaggagtacttgcggcaggtgggcggctctgaggagtactggctgtcccagatccagaaccacatgaacgggccggccaagaagtggtgggagttcaagcagggctcggtgaagaactgggtggagttcaagagggagttcctgcagtacagcgagggcgcgctgtcccgagaggccgtccagcgtgagctagacctgccgcagaagcagggcgagccgctggaccagttcctgtggcgcaagcgggacctgtaccagacgctctacgtggacgcggacgaggaggagatcatccagtacgtggtgggcaccctgcagcccaagctcaagcgtttcctgcgccacccgctgcccaagaccctggagcagctcatccagaggggcatggaggtgcaggatgacctggagcaggcggcggagcctgccgtcccccacgtcccggcggaggatgaggcggagaccctcacgcccgcccccaacagcgagtccgtggccagtgaccggacccagcccgagtagagggcatcccggagcccccagcctgcccaccacatccagcctgtggctttgcccaccaggacttttgagccggggctgactcctgcaggggaagccctggtccagctgggtgccccctcgggctctgggaggactctcacacactcgtgtcatccagatgtgggcaccgcaccccagcatcaaagagccctcccccctgcagggttctgcccatcaccctccctctgtctgtcttcccggcctggaccccaccctccacactctcaggccatcacaggacaccccagcttcctcattctgctacaatgcccaggctctccgggcatccagaaaaccaagtgtccggatagcaggggccagcggccaccaagctcatgggacaccccagagcagaagctagggcagagccaatgctgagggagcctcgacttccggcgccgccgccctctcccagcatctgcagagccagctgacgccctccctgcctcccagggcagctggccagcctcgggcagcacagccccctccccctcctcccaggggagagcagaagttgcagaggcagcagcagcagacctgatgtcccggtgcttcctggcccctcaggtgagcccctgccccaaggcaacacccactgtggggcatctgagagctagtgggacccggaggctgtttttgaggagagcccactgaggctcgggcccccagcaagttagaagggatggggtgggggtggcatcatggaagggggcatcagggagagtgggccaggtgggaggcaggggcagtttgctgagccagctccacatggacccgcgctttctctcccccagctccagtgattcacgcccgcctggagaagaatcagagctcagctcgtgactcacccatggcaggcggagggtcccagaggggctgagtcctcaaatccggctgaggcagcagctggcaccatcggagccaggagagtgacaacaggtaacagggcgccaccctcccacccagaccccaccatcagctgtcccggccaaatgaactcctccccggaccccagacaccctggggcccaggccactccccagtgctcaggcaagctgggaggccctgacagggtcgggggtcctctgccctggaagaccagcgccatccaccagccccagatcctccctgtggagccctggctactgtcgtgcacggtccctcactgccctctctccttctctttcaggtctcaaggttcccacaaagtctttgctgctgtgctgggcatcacacacccctcaccttgcaggctgcctgcgtgggaggcgaagtcccgggacagcccagaggggtgctacagagaggagtcagctgcggcagagggcaggagccccagcttagccctaagcgccagcgtgagggccagggcctgccacgaagcccgccccgctggccaccagctgcctgcccccagagccactgcagcaggagtcgggccctgcctccctcccagcagggaaaccccgcccgctgccaggccatcctctctgccagaggctttcatgagccccaaggctggggccacagctcctactcctgcccagcagccctgagcccagctgcaggaaggagatcccagaagcctttgctcctggggctcctccaggcactctgccctgccccgacaccagaaccctggtgctggtgggctactagcgtctgcagcctgagcaggcgctggctcagggttcatctttctgccttgtccactgggggaccagccctacagaccactctgacaaatctttagcccacaccctgccagccccacagattttatttttgcacataagccataaccgatcctcacaggctggcacaggctttggggaagccctggagcctgtgaagaccctggaaacctcatgaggctgtggccgacccctgccccttacccccgcacagaccaggccttaaatgtccgtccaggccctgtataccttaccccaaagacagactctttttgtaagattttgttaataaaacactgaaacttc

SEQ ID NO: 21 - DNA, 3410 bp, Bos taurus
cagcgcagagctcgggcgctgagtcctccggctccgccgctgccaccaccgccgccgccgcgaccaaccgggaccggccgctcctccgcgggacccgtccgccgcgcctcgcagctccgcgcagccggcccccagcagcccctcgccatccccaagaggattttgcagcctccctctcccgcctatccgagcgagccccgccgcaacctgcaagccgatggagttggaccacaggacgaccggcggcctccacgcctaccccgggccccgcagcggtccggccgccaagcccaacgtgatcttgcagatcggtaagtgccgggcggagatgctggagcacgtgcggaggacccaccggcacctgctcgctgaagtgtccaagcaggtggagcgggagctgaaggggctgcaccggtccgtgggcaagctggagagcaacctggatgggtacgtgcccaccagcgactcgcagcgctggaagaagtccatcaaggcctgcctgagccgctgccaggagaccatcgccaacctggagcgctgggtcaagcgggagatgcacgtgtggcgggaggtcttctaccggctggagaggtgggctgaccgcctggagtccgggggcggcaagtacccggtgggcagcgacccagcgcgccacaccgtctccgtgggcgtcgggggtcccgagggctactgccaggaggcagacaactacgactacactgtcagcccctatgccattacctctccaccggctgccggccagctgcctgggcaggaggaagtggaagcccagcagtacccgccctgggggccgggggaggacgggcagctgagcccgggcgtggacacgcaggtcttcgaggacccgcgggagttcctcagccacctggaggactacctgcgccaggtgggtggctccgaggagtactggctgtctcagatccagaaccacatgaacgggccggccaagaagtggtgggagttcaagcagggctcggtgaagaactgggtggagttcaagaaggagttcctgcagtacagtgagggcacgctgtcccgggaggccatccagcgggagttggacctgccgcagaagcagggcgagccgctggaccagttcctgtggcgcaagcgggacctgtaccagacgctgtatgtggacgctgaggaggaggagatcatccagtacgtggtgggcaccctgcagcccaagctcaagcgtttcctaaggcccccactgcccaagaccctggagcagctcatccagaagggcatggaggtgcaggacggcctggagccggcggccgagcccactggcccccacccgcccgctgaggaagaggccgagtccctcacgcccgccctcaccaacgagtccgtagccagcgaccggactcagcccgagtagagggtgctgggccccgcctgcccgcccgtggcccttgcccgccgggactttagagtggcccgcccctgcaggggagcccttagtctcctcgtgcagctggacactcacctcagcctcctagcccgactccaacagacacgcgtgacccagatgcgggcagtgtcccccagacagccaaggggcttcccttccttgcagacccagccctcaccctccctgcgtctgtcttccccgatggtggactggcctgagtcagcaaccccgccctccatactctcaggccatgacagtttcctcatcctgctcaatgcctgggccctctgggcactcagaaacccagtgtccagatggcacgggctggcgtgcacccagctcaaggaacaccccagagcagaagctcaggggccactggtgcccccggagcctgggcttcagggaagctacttctcctggcagtcgccgtgaccggctggcacccctgctgcctcttggggcagctggccagccttgggcagtgtggctccctccccctggaggagagcccaagctcaagacacagcagcagcagcagccgccgcagtggcaacagacctggcgatctggtgcctcctggcccctcaggtgagcccctgccccttggcaccaccaccagggggcaccatagggttgggagggccctgggcgaagcccaccccaccccaggtgagcccatggaggctcagagcccctggcatccccataaattagctgctgggatggggttggggtggtgccgaggggagatctcaggggtcagggagggggctggagtggggagcagggctgggggaggttgctgacccagctctcacagggccctgtgttttctctccccacagcaccagtgattcacgccagcctggagagggacagagccccgcgcgatgactcacccatggcaggcggcaggtcccctggggcctgagtcctccagccggctgaggcagcagccggcctctgcagccaggaaagtgacgacaggtatgcaggggaccccgcccctggctgtcctcaccaagggccccccagctccccccagcccctggccccaggcccccagtcctctggcctagctgagaaacagccccccaggaccccaagggcttgctctctgagaggtcagccctgccctgccccgccccgccctggcggtccctgagtccctgaccacctgtgtcttccttcctttcaggtctccaggctccatgtagcggagcctttgctgctgtgcccggcactgtcccttgtcctctccccctacaagctgcctgcacgagaggagaagcctgagaccagaggagggggcccaacagagagctgatggtgaagaggggccagtgtgagggccagggcctgctgctatgcccgccccgctggctgcccactgcccgcccgcccccagggccgccgccttcccgggcctggcctggctcccaccccggagcccctgcccgttgcgcggccatcctctgctgccagagcttccgccacggccgcccctgcccggtggccccaggcccagccccaggaggcccggaaacctttgcccctggggctcactcaggctccctgccaagccctgctgcggcctggcccggacccccactgccccagccaccaacaccctggtgctggccggccacctgtgtctgcagcccaagcaggcctggttgggggctcccagactcaggagaccagctcccgcaggaaactctgccagcccctccgtcctgcgtcctgccagcgccgcctcccgccccagattttatttttgcatataagccataacctgctctcctggcgcaggctacggggaggccccaaggtcctcaggggggtgtggtcaagtccccgcccgctgtggatcaagcctcgactgtcaggccaggccatgtccaccttgccacctcacctgaagacagacgctttttctaagactttgttaataaaacactgaaactta

SEQ ID NO: 22 - DNA, 3436 bp, Pan troglodytes
tcagcgcagagctcgggcgccgcgtcctccctccgcagcagccgagccggacctgcctccccgggcgtgctccgccggccccgccgccggcccgcagcgacagacaggcgctccccgcagctccgcacgggacccaggccgccggaccccagagccggaccaccctccgtccgccccgaggagtttgccgcctgccggagcacctgcgcacagatggagctggaccaccggaccagcggcgggctccacgcctaccccgggccgcggggcgggcaggtggccaagcccaacgtgatcctgcagatcgggaagtgccgggccgagatgctggagcacgtgcggcggacgcaccggcacctgctggccgaggtgtccaagcaggtggagcgcgagctgaaggggctgcaccggtcggtcgggaagctggagagcaacctggacggctacgtgcccacgagcgactcgcagcgctggaagaagtccatcaaggcctgcctgtgccgctgccaggagaccatcgccaacctggagcgctgggtcaagcgcgagatgcacgtgtggcgcgaggtgttctaccgcctggagcgctgggccgaccgcctggagtccacgggcggcaagtacccggtgggcagcgagtcagcccgccacaccgtttccgtgggcgtggggggtcccgagagctactgccacgaggcagacggctacgactacaccgtcagcccctacgccatcaccccgcccccagccgctggcgagctgcccgggcaggagcccgccgaggcccagcagtaccagccgtgggtccccggcgaggacgggcagcccagccccggcgtggacacgcagatcttcgaggaccctcgagagttcctgagccacctagaggagtacttgcggcaggtgggcggctctgaggagtactggctgtcccagatccagaatcacatgaacgggccggccaagaagtggtgggagttcaagcagggctccgtgaagaactgggtggagttcaagaaggagttcctgcagtacagcgagggcacgctgtcccgagaggccatccagcgcgagctggacctgccgcagaagcagggcgagccgctggaccagttcctgtggcgcaagcgggacctgtaccagacgctctacgtggacgcggacgaggaggagatcatccagtacgtggtgggcaccctgcagcccaagctcaagcgtttcctgcgccaccccctgcccaagaccctggagcagctcatccagaggggcatggaggtgcaggatgacctggagcaggcggccgagccggccggcccccacctcccggcggaggatgaggcggagaccctcacgcccgcccccaacagcgagtccgtggccagtgacccgacccagcccgagtagagggcatcccggagcccccagcctgcccactacatccagcctgtggctttgcccaccagggcttttgagctggggctgactcctgcaggggaagccctggtccagctgggtgccccctcgagctccgggcggacttgcacacactcgtgtcatccagatgtgagcaccgcacccagcggcaaagagccctcccccctgcagggctccacccatcaccctccctccgtctgtctttccggcctggaccccaccctccacactctcaggccatcacagaacaccccagcttcctcattctgctacaacgcccaggccctctggacatccagaaaaccaagtgtccggatggcaggggccagcggccaccaagctcatgggacacccagagcagaagctagggcagagccaatgctgagggagcctcgacttccggcgccgccgccctctcccggcatccgcagagccagctgacgccctccctgcctcccagggcagctggccagcctcgggcagcgcggccccctcctcccaggggagagtagaagtcacacacgcagcagagcagacctgatgtcccggtgcttcctggcccctcaggtgagcccctgccccaaggcagtaccggctgtggggcatctgagagctggcgggatccggaggctgttttctaggagagcccactgaggcttgggcccccagcaagttagccaaagggatggggtggggctggcatcatggaagggggcattggggagagtgggccgggtgggaggcaggggcagtttgctgagccagctctcacatggacccgcgctttctctcccccagctccagtgattcacgcccgcctggaggagaatcagagctcagctcatgactcacccgtggcaggcggagggtcccagaggggctgagtcctcaaatccggctgaggcagcagctggcaccatcagagccaggagagtgacaacaggtaacggagcaccacccttccacccagaccccaccatcagctgtcccggccaaatgagctcctccccagaccccagacaccctggggcccaggccactccccagtgttcgggcacgctgggaggctctgacggggtcggggggcctctgccttggaagaccagcgccatccaccggccccagcccctccccgtggagccctggctactgtcctgcctggtccttcactgcccactctcctcttctttcaggtctcaaggttcccacaaagtctttgctgctgtgctgggcaccacccacccctcaccttgcaggctgcctgcgtgggaggcgaagtcccaggacagcccagaggggggctacagagagaagtcggctgcagcagagggcaggagccccagcttagccctgagcgccagcgcgagggccaggccctgcccctaagcccgccccgctggccgccagctgcccgtccccagagccactgcagcaggagtcgggccctgcctccctcccagcagggaaaccccgcccgctgccaggccatcctctctgccagaggctttcatgagccccaaggctggggccacagctcctacccctgcccagcagccctgagctcagctgcaggaaggacatcccagaagccatgtctcctggggcgcttccaggcattctgccctgccccgacaccagaaccctggtgctggtgggccactagcgtctgcagcctaagcaggtgctggctcagggttcatcgttctgccttgtccactgggcgaccagccctgcagaccactctgacaagtcttcagcccacaccctgccagccccacagattttatttttgcacataagccataaccaatcctcaaggctggcacaggctttggggaagccctggagcctgtgaagaccctggaaacctcatgaggctgtggccaacccctgccccttgccccacacagaccaggccttaaatgtcggtccaggccctgtgcaccttaccccaaagacagactctttttgtaagattttgttaataaaacactgaaacttc

SEQ ID NO: 23 - DNA, 3463 bp, Callithrix jacchus
agcctgcggctggggctcagcgcagagcttgggcgccgcgtcctccctcagccgcagccgagcgggacctgcctctccgggcgcgcctagccagccccgtcgccggcccagagcgacagtcaggcgctccccgcagctccgcacgggacccaggccactaccgggcaccgccgccggaccccagcgccccccaccccgtccaccccgacgagtttgccgcccgtgcgagcgccggcctctgcgcgcagatggagttggaccaccggaccagcggcgggctccacgcctaccccgggccgcggggcgggccggcggccaagcccaacgtgatcctgcagatcgggaagtgccgggccgagatgctggagcacgtgcggcggacacaccggcacctgctgacagaggtgtccaagcaagtggagcgcgagctgaaggggctgcaccgctcggtggggaagctggagagcaacctggacggctacgtgcccacgggcgactcacagcgctggaagaagtccatcaaggcctgcctgtgccgctgccaggagaccatcgccaacctggagcgctgggtcaagcgcgagatgcacgtgtggcgcgaggtgttctaccgcctggagcgctgggccgaccgcctggagtccatggggggcaagtacccggtgggcagtgagccggcccgccacactgtctccgtgggcgtggggggtcccgagagctactgccaggaggcagacggctacgactacaccgtgagcccctacgccatcaccccacccccggccacgggtgagctgcctggccaggagcccgccgaggcccagcagtaccaggcgtggatccccggcgaggacgggcagcccagccccggcgtggacacgcagatcttcgaggacccccgggagttcctgagccacctggaggagtacctgcggcaggtgggcggctctgaggagtactggctgtcccagatccagaaccacatgaacgggccggccaagaagtggtgggagttcaagcagggctcggtgaagaactgggtggagttcaagaaggagttcctgcagtacagcgagggcacgctgtcccgggaggccatccagcgcgagcttgacctgccccagaagcagggcgagccactggaccagttcctgtggcgcaagcgcgacctgtaccagacgctgtatgtggacgcggacgaggaggagatcatccagtacgtggtgggcaccctgcagcccaagctcaagaggttcctgcgccacccgctgcccaagaccctggagcagctcatccagcggggcatggaggtgcaagacgacctggagcaggcggccgagcctgccggccctggcccccatgtccctgctgaggacgagaccgagaccctcacgcccgcccccaacagtgagtctgtggccagtgaccggacccagcctgagtagatggcagcctggagcccccagcctgcccaccacatccagcctgtggctttgcccaccaggacttttgagctggggctgactcctgcaggggaagccatggtccagctgggtgcccccccaggctcctgcccgacttgcacccactcgtgtcatccagatgtgggcaccgcacccagcagcaaagagcccttccccctgcagagctccgcccggcaccttccctccgtctgtcttcccggcctggaccccaccctccacacactcgggccatcacacaacaccccagcttcctcatgctgctacaacgcctggccctctgaacatccagaaaaccaagtgttgggatgacaggggccagcaaccaccaagctcatgggacaccccatagcagaagctagggcagaactagtgctgagggagcctcgacttcggtgccgccaccctctcccggcatccccagagccagcagacgtcctccctgcctcccagggcagctggccagcctcgggcagtgcggccccctcctcccaggggagagcagaagtcacaaacgcagcagcagcagacctgatgtcccggtgcctcctggccccccaggtgagctcctgcctcaaggcaccacccaccatggggcatctgagagctggcaggacccagaggctgttttctaggagagctcacccagctggggctcccagcaagttagccgaagggatggggtgggagtggtgtcatggagggggcatcggggagaggggccgggtgggaggcaggggcagtttgctgagccagctctcacatggacccgcgctttctctcccccagctccagtgattcacacccgcctgaaggagagctcagctcatgactcagccgtggcaggcggagggtcccagaggggctgagtcccaaatccggctgaggcagcagccggcacccttggagccaggagagtgacagcaggtaaccgagcaccaccctcccacccagaccccaccatcagctgtccctgccaaatgagctcctccccagaccgcagacacccgggccccaggccactccccagtgcccgggcaagctgggaggctctgacagggtcaggggcttctgccctgggagagcagcgccgtccatcatccccagcccctccctgtgaagcctgctgtcccgcacggtcccttaccacccactctcctcttctttcaggtctcaagtttctcacaaagtctttgctgctgtgctgggcaccacccacccctcaccttgcaggctgcctgcgtgggaggcaaagctccaggacagcccagagtggggctacagagaggagtcgctgcggcagagggcaagagcccagcttagccctgagtgccagcgtgagggccagggcctgccgctaagcccgccctgctggccgccagctgccggcccccagagccactgcagcaggagtcggggtcctgcctccctcctagcagggaaaccccgcccgctgccaggccatcctctctgccagaggctttcatgagccccaaggctgggcccactgcccctactcctgcccaggaaccctgagcccagagcccagctgcaggaaggtgatcctggaagcctttgctcctggggctcttccagaccttctgccctgccctgacaccagcaccctggtgctagcgggccactagcatctgcagcctgagcaggcgctggtcagggctcatcttctgccttgtccactggggaactagccctcagaccactctgacaagtcttcggcccacaccttgccagccacacagattttatttttgcacataagccataaccagtcctcacaggccggcacaggctttggggaagccctggagcctgtggagaccctgggaacctcacgagggtgtggctagccctgccccttgccccacacagaccaggccttacatgtccgtccaggccctgtgcaccttcccccaaagacagactcgttttgtaagattttgttaataaaacactgaaacttc

SEQ ID NO: 24 - DNA, 2480 bp, Columba livia
cccacatgttgagctgtgtgaggtataagtagatggaagagcctggactagtggcagttcaggcagggaagagaagcagctctttgcatctctactgaaagcatttttcgactcgacaagtttaccagaggagaaatcaccaggattttctttgcagcagcagcagcttccagcttcttgtgtgcatctctgtgtgtttttctccagcggggactttccactgttcaagattctcagctccagacgagcaggtagcgggcacacgtgcgggactggacgtcttagccaactcctctccttgtttctggaagatcctggctctctctgggacaccctgagcacgtgagaccagcatttccagctgcacatcgggagaaatttgcctacaactctctctgggatccctgggaccgaatagctcgctctgtggtgatatttgatttggctgtgtttgtgttgaaaagtcctttgaggggggtttagaagtctctgtgtgtcttttgggaagtgttgtagtggggttttggagagccagctctagcattagggcttacaacctagttctttccgtgtttgacacttgcacggtaggagccatgcagctggataatgtcaccaatgcgggcattcactcctaccaggggcaccgtggagtggccaacaagccaaatgtgatcttgcagatagggaaatgcagggcagaaatgttggagcatgtcaggagaacccaccgacacctcctgtctgaggtctccaagcaggtggaacgcgagctgaaaggcttgcagaaatcagtggggaagttagagaataacttagaggaccatgtcccaactgataaccaaagatggaagaagtctatcaaggcctgcctggccagatgccaggaaaccattgcccatctggagaggtgggtcaaaagggagatgaatgtttggaaggaggtctttttccgtctggagaagtgggcagaccgtctggagtccatgggaggcaaatattgccccggggaccatggcaagcagacagtgtctgttggggtgggaggcccagagttaaggccaagtgagggggagatttatgattatgcccttgatatgagccaaatgtatgcactgacccctcctcctggggaggtccccagcatcccccaggcccatgattcctaccagtgggtctcggtgtcagaggatgctccagtctccccggtggagacccaggtctttgaggatcccagggagttcttgagccacttggaggaatacttaaagcaggtaggtggaacagaggagtactggctgtctcagatccaaaaccacatgaacggcccagctaaaaagtggtgggaatacaagcaggactctgtcaagaactgggtcgagttcaagaaggagttcctgcagtacagcgagggcactctgactagggatgctatcaaaagggagctagatttgcctcagaaagagggagagcccctggaccagttcctttggcgcaagagagacttataccagaccctctatgttgatgcagatgaggaggaaattatccagtatgtggtaggcaccctccagcccaaactgaagcgcttcttgagttaccccttgcccaaaaccttagagcagctgatccaaagagggaaggaagtccaaggcaacatggaccactctgaggagcccagcccacagaggacccctgagattccatcaggagattctgtggagagcgtgcctccctcaaccactgtcagtcccgtgccgagcaatgggactcaacctgagccccccagcccaccagctactgtcatatgagccagtccaagggaggcagcagtctgggttacatgaaagggagaagggggagtatttaggaagcttctctttggagagaggttctggctgagacgagacatgaggtgtgctcagtctaacagcccatagcagcagaattaacttttgcttgtggggggagggaggtggtgggggagaggcaccttaggatgtggttgcccacctcacttgagccatgcaatacagtggtgttggagatgctgcttgcaccactgtggggaatgggacaattttatgagatccctgagaagaaactagagacaattcccaacttcagaggcagccgcttagcgctggtggctttcaaggacttcaaatgaatgcagcaataggctgagggttcctacccatctggatctttcctactccttctctcatccctcttctgaagatgtgtccctatcatgaggagacatctttcttttgacccctgcccttttctgatttaccactgggtgtctattcacttggcaatctcctgttcttatttgctccaaaggattaaataagttttatttatttttttagaagaaatcttatgatttcagggactgaaaactttcaagaatctggattattttcagtggttttcatttcactgcacctaatacctgctttaacaattttcct

SEQ ID NO: 25 - DNA, 5685 bp, Chelonia mydas
atggggagctgtgcgaggtataagtacaagggaatgcctgagacaggagcaattccgaccgggaagcgatagagctctgtgtcgctttcgcccggggctcgaagttagcagcagtttggaaggcaaaggagaaatctctaggatattagccagcagcttctagctgtgtgtgtgtttcggcagagggaactctcggctgatcaagatcccgcactccggaagaggacagcagacacggcgcacggtgggagatcccaggccgggacgccctctctttcccaggcgctcactgcctgacagcgtcgccctaggcacgtgggaccagcacgctgggagcggcctgaacggatttgccaccgactccggctggctgcaaaggggactggacagctctccttggggtgatatctgactcggttgtgtttgtgtgagacgtacttggggaggcaagagggggcggtgtgtgtctttcgggagaggatttaaaagcagggcaggagtgtcactaaattaaaagcccggggtaaccactagggctttacctctagctctgttgcattgctgcttggtttagcctgctcacgccacaggaaccatgcagctggatagcatcaccaatgggagcgtccacaccttccaggggcaccgcggagtagccaacaagcccaacgtgatcctgcagatagggaagtgcaggactgagatgctggagcacgtcaggaggacccaccggcacctcctcacggaggtgtccaagcaggtggagagggagctgaaaggcttgcagaaatcagtggggaagctagagaataacctggaggaccatgtcccatccacggacaaccagaggtggaaaaagtccatcaaggcctgcctggccagatgccaggagaccattgcccacctggagaggtgggttaagagggagatgaatgtctggagggaggtgttcttccgcctggagaaatgggcagaccggttggaggctatgggggggaaatatggccccgcggaccatgccaggcagactgtctccgtcggggtgggaggcccggagggcaggagcaatgacggggagatttatgattatgcccttgacatgagccaaatgtacgcactgactccctctcccggggagataactagcatgccccagccccacgactcctaccagtggatcaccgccccggaggacgctccggcctccccggtggagacccagatctttgaggacccccgggagtttttgagccacttggaggaatatctgaagcaggtgggagggactgaggagtactggctttctcagatccaaaaccacatgaacggcccagctaaaaagtggtgggagtataagcaggactcggtcaagaactgggtggagttcaagaaggagttcctgcagtacagcgagggcactttgaccagggacgccatcaaacgggagctggatctaccccagaagcagggggaacccctggatgagttcctctggcgtaaaagagacctgtatcagacactctacactgatgcagaggaggaggagattatccagtatgtggtaggcaccctccggcccaaattcaagcgcttcctgagtcaccccttgcccaagaccttggagcagttgatccagagggggaaggaagtcctaagtgacttcgaccagtcagaagagccgaccccccagagaaccccagagcatcagccaggggactcagttgatagcttgacaccttcaaccacagctagtcccattgccagcgatgagacgcaacccgagccccctagcccaccagctacggtgatatgagctagtataactacgggattggcctgtattatacaaaggtgtggagggggctgatttaggaagcttctccttagcgagaggttctggctgtgaccagtcatggctggactcagtccagtggccctcggcagaggaatgaactttgtttacggatgggccacgtgagaacgtagctgcccgcctcacccgagtcatgtgacaggggtggtgcgagtctgaggatactattttaaccactgtggggtggacagttttatgatactcctggagtagctagactgttcccctctgcagaggcagccaccctatgctggcgcctttcaaggacttcaaacaggtgcagctattgaccaagagttcccacctacccaccagtctcgtatcctctggagaggggtccccttcctaagtggaacatccttgttttgacacttgcctgtctctgtcacactgacgggactttgtccaccccaagaagaagctactggcttctgcttccttcgcaacctcccaccaaagcttcagggcagaaacttttttaaagttcataatggtttcgaagtgagcctagaacttgcaaatggcaactttaaggggtttgatcaattttaccacctgacattgtatctcacccggcacctgctctcatttttcctcccaggggttctctccctttctcagctccttctctccccgtgggtgacccatgccaacaggccgttgcagcaacaagggaaatttcatcccatgtccgctgctaccgtggagagggaagcccaaacttgcttcccaccatccctccaggtggcaattcagcatgtgctgtttcaccactagactgggcgcaactaaacctttgttccttgctgcattagtcttctctagctaagattcaggaccaggcagatgaatggggataagccagagatctttctactttggggttgtgagatggggcaatcagacaaggcatcaacattgtacaggggtaaattcctattcttttttttaaatcaaacaaacacaccctgaactcagagcaaatatcccccaaacagcaaagcaaggcccctccattggagatgtcagtacaataggacatcagaagtccatttctgtggaactttgccacaggaaatcagaaacaaagttaagaggtgctacatgtgttgggtcccagaccctgcttgcaaagaagactccttgatggcagatctacagacacattgcttttggaaggtctgatgtcctaggtatgaggagtctgatggatgaactttgtctaaaaccgatggactttctaaaccagccccttcgttctgcaagctggtactagatggagctgaaattgggctctgtgctactcttccacgttaaatatcaaagaccagaactggctgcactttgactaaagcatgaagatgggactttgagacaggacgtttggaccttcttgatcttcaggcctggctaacgtactgagaaaggctttacggggggtgtgctaacaacagtgccccacaccactctcggttgcacttcagcaactgcatagcatccatcacctaataggcagcatcagcacgtgagagaaagagagaaactacaaggagtagctggaatttccctgggactccgcagctgccccggtggctctgaaaacctttgggtgcgactccttcccagaggctgaaggtaagacaacttccccactctgcaattagcaagtgttaaggcaggtgtcataggagctaactcagtccaggggtgcgtgggtcccacagcactgaagccaggggtgttgcgccaagactgacattggcccctaaacttaggtgtgccgctgaagcacgcaacgtcagagagaggggtggcgatggcatagcatggcccaagcgggtatagtaactcagagtaatgggagcggatcgagcaaagggaaattaaatgcactgaactgtgggataatgtcctgaggggaggggtgggacatttaaaacaggaacgatgactcctcctgttagctaagcaacctaccagctccctctttagcacagctgaataagcgactgcctctagactaagaggttccaagttcaagtcctggggatagtaacctacgcagcatgagttgagtctcaggaccggggactttgcccatgtctgggacagagagcaagcgttctttccttgctgctgagacatctttgcttggctgtgactgaatgtcagtgcagaagggggatctttacactagcaagctgagatctgtgggaatggatgacagagtgtcaatgcaaaatagtatctgtcactgtggctcacgtgtattactctgttacagtgactcactctgaagaattcacttcacactgctccgaacacagaagaaaagaggcttaaattccaagggttcagcaagggggagcggatgtccgaagtcaaagccaccgtgtgcctcatctgcagtcctgagggaaacacccagtccaggtaattagtgctcggccagacctttccgaagctcctaaagggtctgatgccaagtgctgaagggtgctcgatgccattgcatgcaccacccagaggagtttattcctgagagggggagtgggcatcacagccttgtcttctccttatgacattcaggccaccaagcagccatcagggtctgacccaggccaccgggggtatgtctacacagcaaagaaaactccacggctggccggggctagtctactggggctgcggggctgcgtagacgtccaggctggggttggagcccgagctctgggaccgtcccagcccgcagggtcccagagcccaggctccaccctggtgtcctagccctgaaagtattccctccctacagcccctgctccatcctgcaccctccacttaatcctgtttgttgttgcttttagggattgctgctaccgttgctgagcttctttctgtacggccgagagccgctgtttccattgggaagaacgggagacctcagcactcccagaagagccttctgccagagaaagaggtgatgggatgaaagagtggcttgaaagacacggcgatgaagcgtcaaagagggagctacctccgctgagcagaaaaagctccagggatggcgctggtcaaagctgggccacgctcagtagaccaagctctgtatagaaggaaaggcaaaagtgggcatgaagaaacaagctggtccttggactttggggacagcaggaacgctggagttgtgctataactgcacaatactccctgctgatttaggtgtaactgcacccagggaattggaggctgatggggcctggaggaaagaatcgatccttggttgtgaactaaaatcctgctctgattcaatttgccgaaagcgacagatccaagcgggccacaaaccctcctggttgttaatgttttaactcatttgacctaagtgtgggtagtttcgtttcatgcaggtagccatggtcaaacctcaatagctttggaggttcagaaaagcatcctggaagccagatgcttgtctgaacaatgtgagtctgcacagctgggccagtcagctcacaagaacagaccctcttgtgagataacagacacttcctgcttctggatgggccagaattaccgcaagaagtgggtttcttgtgctactttggtgcttttctttccggccagaaccaggaagtgtaatggggtgtgaaaaacaatcatgctagtgaaattgacccaacttttttgaacatcaagaaagttttggttcatgtgtcgggtgaagggtcgggtcggttcttatttcttccaaatccacccgtcccgtgtgtgtgtgcgtgtgtgtgtgtatgtgtgctgagcaaccaaat

SEQ ID NO: 26 - DNA, 3543 bp, Mesocricetus auratus
tccagtgcagtgccagggcgactagtcctctaggagctgcagtctccgggcctctccagccccagcaccggcgcgcctgccactctcgccgagtcccgcgcatcaccgcgcacctgcctctgctgctgcacgccggccgctgcctgccgctctgctgcctcccgctctgctgccttcccgcttctgccccagaggagttcgcagcctgtccggggccgcagtacctgagagcagatggagctggaccatatgacgaccggcggcctccacgcctaccctgcccagcggggcgggccggcagccaagcccaatgtgatcctgcagatcggtaagtgtcgagccgagatgctggagcatgtgcggaggacccatcggcacctgctgaccgaagtgtccaagcaggtggagcgagagctgaaagggttgcacaggtcggtgggcaagctggagaacaacttggacggctacgtgcccaccggcgactcacagcgctggaagaagtccatcaaggcctgtctgtgccgctgtcaggagaccattgccaacctggagcgctgggtcaagcgtgagatgcacgtgtggagggaggtcttctaccgcctggagcggtgggccgaccgcctggagtccatgggcggcaagtatccagtgggcagcgagccggctcgccacactgtctccgtaggtgtcgggggtccagagccctactgtcaggaagccgatggctatgactacactgttagcccctatgccatcaccccgccacctgctgctggagagctgcctgatcaggagtcagtggaggcccagcaataccagtcttgggggtcaggtgaggatgggcaaccacgccctgatgtggatacgcagatcttcgaggacccgcgggagttcctgagccacctggaagagtacctgcggcaggtgggcggctctgaagaatattggctgtcccagatccagaaccacatgaacgggccggccaagaagtggtgggagttcaagcagggctccgtgaaaaactgggtggaattcaagaaggagtttctgcagtacagcgagggcacgctctcccgggaagccatccagcgggagctggacttgccgcagaagcagggtgagccgctggaccagttcctgtggcgcaagcgggacctgtaccagacactgtatgtggacgctgaggaagaggagatcatccagtatgtggtgggcaccctgcagcccaagctgaagcgctttcttcgacacccactgccgaagactctggagcagctcatccagaggggcatggaggttcaggacgggctggagcaggcggcggagccttctggcaccccgctgcccacagaagatgagactgaggccctcacacctgcccttaccagcgagtcagtagccagtgacaggacccagcctgaatagagggccagcccagggtccctccccagcctgcctgctccacccagcctgtggtctttgccacctgggacttgagctggggctgactcccaatgggtgtcctgtccagcctgacatctactcccccctggcctgacttacatacaactgccacacgaccatgctacatggaccgaacatcgagaagcccctctcccacagggctcccacccctcacctgtctgccctcgccctggccccagccccactggccctcccgtctccttctcagtccatcacagaacacccttagcttcctcgttctgcgccagtgcccgtgtcccttgggaaatcaggaaacaggtgtctggaaggcgaagagcagcaggcaccacacccaggggcacacccaggcaccacacccaggggcacacccaggggcacacccaggcaccacacccaggggcacacccaggcaccacacccagggaacccagggcagcagctcgaggacaatcagtgccaagagaacctcagccttcagggatgccgcccgctcctgcagacacagcagacccagccggtgccctggctgcctcccaaggcaactggccggccgtgggcagcgcagctcccctcaccgggctgagccacaatgcagctgaagcagcagacctgacatcatggaacttcctggcccccaggtgagccctgccccatgtgtcttagagttggggtgggcagaggagtcaagttcacgttccgggaacccttaaggcttctctagcaaattagctgcaaggatgggatggagaggcatcagggtgggtgccgttgtggtaggcactggtactccagggatccaggagggggctgaggagggggcaggactgggggagtttgctgagccagctcacagggaccctatgctttctcgccccagcagtgactcataccagccaagaaaagcaaagctcagctccgtgactcagccgtggcaagtggagggtcccagaggggctgagtcctcacagccagctgaggcagcagctggcaccttcagagccaggagaatgatatcaggtaagggagtcttgcctcctgccctggcctagccaccctccaaatctctgtttcccaagaagtccctaatgccccaggggcacccgctggggacagggctccccactgtccctcccagatcaccgggcgagcagctctctaaccaccttgctgcctcctgtctccctcaggtctcaaggctgctgagaagtcttccttgccatgcctggaattggcacaccacagtgccggcgccggccccgcctctcctgaagctgcctgcacagaagttacaagacactttcagggcagagaaaacaggattacagagaggaggcgcctggcagagggcagcaccccaaatcagcctgagagctggagtgaagccaggccagcgtgaagctagggtgatgcccaccccgctggcctctagctgcccgccatgagccactgcagcttgagcagggtctgtgctcctagccctcttagcacagaacccagctcgctgcgtggccattggccgcctcgccggaaccttgcaggagtcttaaggcttgggccccagcccagcccagcctttcctcctgtgtcctacctggtggtccaagcccagtcccaggagaccccaggccttggccccggggctgtaccaggcactcccctgtcccgccctgctgctgcccagctgagcctcacccaggccccggcaccactgccccgtgctggtggctgctcgtgtctgcagtctgagcaggccttgttgaggttcctctgtctgcctggtccactggtgttctgggaccagttcccctgaagttctgacagatcctctgccccatgcccctgccagcccccacggctttatttttgcacaaaagccactggctggcacagggtgtagggaagccctgggaaccagggagaccctggagatttcaagagagtatggctaccccctattcccaccaagccttgaaaatccagccaggccatctgtccataccatcttacctcgaagacagacttttatatagatatatacacatatataagattttgttaataaaaccatggaacttc

SEQ ID NO: 27 - DNA, 3491 bp, Equus caballus
tgggcgcagagctccggcgcgtctcctcccgcaccgccgcagctgtcgcaccgggacgcagccgggacccagccggaccgagcgcgctccgcaggactcagcgccacaggcatctccgcacagccggccgccagcaacccctcctcagccccaagacgactttgcagccctctgcctcccgcctgtccgagcgtcgcggccacctgcgcgcagatggagctggaccacatgacgagcggcggcctccacgcctaccccgggccgcggggcgggccggtggccaagcccaacgtgatcttgcagatcggtaagtgccggaccgagatgctggagcacgtgcggaggacccaccggcacctgctggctgaggtgtccaagcaggtggaacgtgagttgaaggggctgcacaggtcggtgggcaagctggagagcaacctggatggctacgtgcccaccggcgactcgcagcgctggaaaaagtctatcaaggcgtgcctctgccgctgccaggagaccatcgccaacctggagcgctgggtcaagcgcgagatgcacgtgtggcgggagatcttctaccggctggagaggtgggcggaccgcctggaggccatgggcagcaagtaccaggtgggcagcgagccagcccgccagaccgtctcggtgggcgtggggggtcctgagaactactgccaggacgccgatgcctacgactacacagtcagcccctacgccatcacctcgccgcccgccgctggcgagctgcctgggcaggagccggtggaggcccagcagtacccgccctgggggccaggcgaggacgggcagctgagccccggcgtggacacgcagatcttcgaggaccccagggagttcctcagccacctggaggagtacctgcgacaggtgggcggctccgaggagtactggctgtcacaaattcagaaccacatgaacgggccggccaagaagtggtgggagttcaagcagggctcggtgaagaactgggtggagttcaagaaggagttccttcagtacagcgagggcacgctgtcccgtgaggccatccagcgcgagctggacctgccgcagaagcagggggagccgctggaccagttcctgtggcgcaagcgcgacctgtaccagacgctgtacgtggatgccgatgaggaggagatcatccagtacgtggtgggcaccctgcagcccaagctcaagcgcttcctgcgccacccgctgcccaagaccctcgagcagctcatccagaggggcatggaggtgcaggatggcctggagcaggcggctgagccagccgggccccgcctccccaccgaggacgagggtgaggcagagtccgtcacgccggccctcaccaacgagtccgtagccagtgaccggacccagcccgaatagagggcagtcagggcccccacctgcccaccacaccgcgcctgtggcctttgcaaaccaggactttcgagctgggctgactcctgcagggggggccctcatcctcatccagccgggcccccacctcagcctcccagcctgactcacacaggcacacgtcatccagatgtggacagcaccccccaaacagcaaaggagcccttctcccctgtagggcccctgccccatcaccctccctccgtctgtcttccccacccctgtacctgcctgggccagtgaccctcctccaccgcacccccctccccccagccatggcaggccatctcagcttccttattctgctcaaaacccgggctctctgggtactcagaaaccaaatgtccagatggcacggaccggcaggcaccgacctcaaaaaacaccccagagcaaaagctaaagcagaaccagtgctatgagaacctcggcttcaggggcgccgccctctcctggctgtcaccacatagccggctggcacccttgccgccgcccagggcggcgggccagcctcgggcagtgtggctccctcccccagaagagagctgaagccgaaaacacggcagcggcagccgcagcagcaacagacctgagcaaactcctggtgcctcctggcccctcaggtgagcccccgccagagggcactgccatcagggggcaccgtagagcccagagggcccgggtcaagtctgttttcccggtgagcccagcaaggctcagaggcatcccgcaagttagcgcagggatggggtgggcatggagaggcgggaggagcagagaccccgggatgggggggtgcgccgggctgggagcggggcagggggagtttcctgagctagctctcacatggaccctggttctctctctcgccccagcatcagtgattcacgccagcctggagaaggcttgagctcggctcgatgactcacccttggcaggcggaaggtcccacagggcctgagtcttcaaacccggctgaggcggcagccggtgtcctcggagccaggagaatgacaacaggtaacagagccccatccctcccagacgagaccccgtccctcagctgttctccccaggccccgcccccaggcctctgggcaagctgagaggcagcccaccaggatccccggggcttcccctctgggagagcagccccattatcccccccaccaagtccttcctgtggagaccccccagcctcctgccctgtccctgacggtccgtgtcgtcctttctttcaggtctcaaggctcccgccaagcctttgctgctgtgcctggcaccaccccctcccgtctcctccgcaagctgcctgcacaggaggagaagtacaggcccgtgagggaggggggctgcagagagaaggggaccctgacagagctgccggtgaagatgggccagtgtgagggccagggcctgccactttgcctgccccgctggccaccagcctgtccacccctagggccactgtggctggagccaccttgtcttgctccagcctgagaacccccgcctaccacgtggccatcctctactgccagagctttctgcgagcctggggctgaggccacagcccctgcctctgccccgaggccccaggcccagccccaggagatccagaagcttttgctcctggggctcacgtgggctctctgccagccctgccgttgcccaggcccggacccccgcctcccccagcaccaacaccccggtgctggccagccgctcatgtctgcagcccaagcaggccctggttgggggttcctcttctgccagtccactagagattcgggtcactaacgatgtctgcaggtgactgctggccccccatctctgccaggccccccagattttattattgcacataagccataagccacactcacaggctggcacaggctgcagggaggtcctagggtcctcaattggatttggccagtcgccccacccccaagccatgaaggtcaggccaggctgtgtacacccctgccaccatacctgaagacagacttttttgtaatattttgttaataaaacactgaaacttc

SEQ ID NO: 28 - DNA, 3164 bp, Marmota monax
ccggagcgcggccacctgcgagcagatggagctggaccacatgacgagcggcggcctccacgcctaccctgggccgcggggcgggccggcggccaagcccaacgtgatcctgcagatcggtaagtgccgcgccgagatgctggagcacgtgcggaggacccatcggcacctgctgaccgaggtgtccaagcaggtagagcgcgagctgaaggggctgcacaggtcggtgggcaagctggagaacaacttggacggctacgtgcccacgagcgactcgcagcgctggaagaagtccatcaaggcctgcctgtgccgctgccaggagaccatcgccaacctggagcgctgggtcaagcgcgagatgcatgtgtggcgcgaggtcttctacagactggagaagtgggccgaccgcctggagtccatgggcggcaagtacccggtgggcaacgatccagcccgccacacggtctccgtgggcgtggggggtcctgagagctactgccacgagactgatggctacgactacacggtcagcccctatgctatcactccgccacccgctgctggtgagctgccgggtcaagaaccagctgaagcccagcagtaccagccctgggggcctggagaggacgggcagccaagccccggtgtggacactcagatcttcgaggacccacgggagttcctgagccacctggaagaatacctgcggcaggtgggtggctctgaggagtactggctgtcccagattcagaaccacatgaatgggccagccaagaagtggtgggagttcaagcagggctctgtgaagaactgggtggaattcaagaaggagttcctgcagtacagcgagggcaccctgtcccgagaggccatccagcgggagctggacctgccacagaagcagggtgagccactggatcagttcctgtggcgcaagcgggatctgtaccagaccctgtacgtggacgctgaggaggaggagatcatccagtatgtggtgggcaccctgcagcccaagcttaagcgctttctgcgccacccactgcccaagaccctggagcagctcatccagaggggcatggaggtgcaggacggcctggagcagggggttgagccagccggcccccaggtgcccactgaggacgaagcagaggccctcactcccgccctcaccagcgagtctgtggccagcgaccggacccagcctgaatagagggcagcccagggcccccagcctgcccaccacagccatgctgtggcttttgctaaccaggacttgatctggcactgatacccactgggtcattcctcatccaacaggcaccctcagcctccaggccctaatcacagacatgccacccagatgtgtgcaaagccctgagcagcgaggagcccctcccctgcagggctcctgcgtcaccccacctctgtctccctggcctcctgcctgggcctgggggcagccctaccctctgcactcaggccactgcagaacatctccagcttcctcattctgctccagtgcttctgggcacacaggaaaccaagtgtccagaaggcagagaccgctcaacagggcacccgggcagaaggcaaggcagaaccagtgctgaacctcaacttctggcacaccacccactcctggcagacactgcagagccagctggcactcccgtcgccccccggggcagacggccagccttgggcagcacaactcccttctcagggagcacctaagttgcacatgcagcagcagcagcagcagcagacctgacatcctggcgcctcctggcccctaggtgagtccccacctctgtggcatcttagagctgggagggtcagggcccagttcattctccaaatgagcccattgaggctccgaggcagcaaagatggggtcgggatggcatcgtgggggtgcagagagacccccaggatcaggagtgggctggggtgggaggcagtgctgaggagctggctcagcccgctcaccgggaccctgtgcttctcatctcagatagtgattcatgccagacgcgcagggtctgagctctgctcagtgactcagctgtggcgggcacacagtcccagaggggccaagtcctcaaatccggctgaggcagcagccagcactcggagccaggagaatcacaacaggtaacagagccccattcttcctgcctcagactgcccctctgccatcctgcccaggcatgcgctcacccatcccctgtgaaagctgagagtctgtgcctggaccctgggggctccagcccaagaacctgcccccggtcctgcctgtgagcccactgctctgttgctgatggctgtgctttctctccttcaggtctctgactgccttggagtctttgctgctgagcctggcactgtcttcccctctctcaaggctgccagccccagggcagctgagagagggcagctgcagagaggaggcgttctggcgctgggtagcaccccagctcggcctgagagctggtggtgaggatggaccggcgtgagggccagggcctgccgctatgcccgccccgctggctgccagctccctgcccctagagccactgcagccaaagccagggtccactaccctggcccttccagcagggagtccctgcgtgctgtgtggctatggcctcctgccagatccttttaggagccccgaggccagggccccagcccctccagcagcccccaggccagccccaggagatcctgaggcctttgctcctgggctgtcccaggctctctgttctgccctggccctgcttttgctcaggctagaccctgggccactcatgtctgcagctggagcagcccggactgaagttttggaggttcctctttctgccttgcctattggggttccggattctggggaccaactctgcacatgatctgatgaatcctccaccctgtgcccctgcccatccccacagattttatttttgcacataagccataactcatactcattggccagcacaggctgcagggaggtcctggggcctggggagacctcagagggtgtgcctcccccctacacaaactacgccttgaaagtcctgccaggcctgaatccctgccaccttacctcgaagacagactgtttttataagattttgttaataaaacactgaaacttg

SEQ ID NO: 29 - DNA, 16350 bp, Meles meles
gccgccgccgccggaggagccgaaggttccactcagcccggagtcagggatctgctgagcctggcctgggccggcaggtgcatgtctgggtggctgagagatggggtgaagaccaggcctcacaggccctggggcccctccttccccaagccagttcccacctctccccccatcccttccatgacctcctctcccttcccacctccagggtcagcccagggccttttcattgcccagaacactgcagcctcccagcgtcccagctcctcccagctcctcttaccatccaagcactgggccccaggaggtcccagagcttctcagggctgaggccaggctgattcctctgggcaaccctgcatacccgggacaggtgtgtgctccataaatgccagaaaaaatacacacctggggtgccccagcatatggacaggtagggaccaatcagggcgacccctggtgcccaataacgcttcctcccaacagcagggatggtaggatcacacccagattggaccccagattatgctccaaacccaggtacaacgcagtcctgataccaaccgcaggctgagtcctgaacatgatctcatactgagcctggatcctgctcacactctgagccctggtcctgatcatactctgagctttgatactgatcacaccacgaggcctgaccctgctcacactctgagccctgaccctggtcacactctgagccctcatcccggtcacactctgagccctgatcccggtcatactctgagccctgatcccgttcatactctgagctctgaccctggtcacactctgagccctgatcttggtcacactctgagccctgatcccagtcatactctaagccttgatcctggtcacactctgagctttgatactgatcacaccacgaggcctgaccctgctcacactctgagccctgatcctggtcacatgctgagcccggatcccagtcacactctgagccctgactgtggtcacaggctaatccctgaaggagttcacaggctgagctctcaccccggcccatgcattttctcagctcctaaagaggacaagaccagggagcctggagccctgtgtatgttttaacctctagaagccacaagcctgtgctgactcctgcttcctccccacgtgtgactcagtgctctccctggccgaaacactcccctgctccacctgtcacagctcccgctgagtgtggttccaggtcctctgggtgacagcagcggttccgggtgtgggggcagacgagcggtcatggagctgactcaccgaagagctgggggaggcgtccgtgtcagaaccggctccccggctccccacgcagctctcggaccgcagctatccaggtggcggctgggggagcgagcggggcggtgctttcctgcagaacagagcacgtccaggtcacacagtgggcaggggcctgccagggcccgagcagagatcccactgtgctggcttccgccctcggtggctgtgggtctttggggcctagtggacacctgccctggctttccccccaccttgggctctggcccttccctgtcaccagctggagtcagtggcctcttgctgcagaagtcaaaaagctgtgggtcccacgtgggggtgagcctagagagccaggcggggcaggggggggcaaggaactcctttctctcagcacccgtctggcctggccccctgctcactgggacacggctcccacctgaagaggcctggagctgggcgctggctgaggagatgcggaaaagagcctgagaaaacttctcagaggggacaccgggaaggcaaaagagccctgtgacggcgaaaggtcagcctccaggacggggtggggccagcgtccaggagggggtggggcaacatcagggagaagcccagatccctttggaagtggtctctctctgcctccctccctttcctcccgtcagagcagctgcgcagcccgaccgacaactggtgagcggcggagtctgccgccggcagccgcgcacgtgaactcaggagcagatactcccgggcccatccctccggtgatgctggcagccggcctggccctcagcagagccctgtgggagcccgggcccccccgagttcatgccccgcggacgccaacagagacgacaacgacggctgcttgaagccactgagctcggagcagctcgcggtgcagccgccgaagcagtgctccccatcccctgggcccacccagaccttcttctgggtggcacccccgcccagctgctgcaagtgctggctgggaacagttcacaaggccccttccttggagaactgcccttgtcggggaggggccccctctcagaggggaggccactgacccggcgtgggatggcctgtgggccactgggctccaggaagtcacatgctcccttcggaactccatggatggagcgggctgtgtgcaagcccgctctgagctctgacctctccccatcaccacagttctgcctctgcagagaggacccccttcagtgaacggtggaacagacgtccccacgttaggccctggttctaggaagctgactggaggccacggccacccgcagccattccaagaggttggcccttggtgtccaggcccagggatgacaaaaggggccccgcctctggagtgcagttgggggacagctcttcctgtcctgatcacggccgtgcacacggccaggtctgttctacccggagcttggcagaacgccccctcactcacaggggagtaggggacagggggcatccagccaggccctgaacggagaaaacttggccaacgtgctcgaagaccctggttcagcctccttttcctgctgggtgggccaggcctttctggggaggggctcggagagagcgagagagggagcatggggagctggaggcgggagcgttgtctcccaacctggattgccgctgggtgccagtgctcagtgacatctctgcggtgattcagcaaataaccacccccggcggcccctgtgccggcagcctgcatagggaatgcagatgccagcaggctgagcctaccattctgggtgctggagcgggtatgggggagcatggaagcactgtgggagtggtttcaggccaggcacaaggatgcttgggctgatggggctctgcccacctggaggcacctgctgggcctcagtccttctccctgtgaggcggccggggtggtccctgacaacgtggccttcccgcgatccccgttcttgcgtgcctgccctccccagggctgagccatctgaaccctcggcgtccccacccagggtaagagccacctgcgaacaagccagatgcccccagagcaggtgcggtgagtcactggtgcgccacgccaacagcctgtacggccaaagcgagtcaccactacggaggtgctgaatgcaacacgcgcacacggacgggacccacgaaagaggagtgcaacggagtccgcctgtgactgagggcagggccgaaggcttctgttccctgtgaacctgacctccgaggtctggggctccctgcggagcctcccgacccttgtccggatggaggggaagggacagaggcacccaggcccacacagttgctcgggctcagccacatttaccatccacccacgccttagtagctgttccaggctctgtccctgggagcccagaagagcagcggttcctcctctggtccctagagccccgatgcacacggttagagctccccgtgggctgcgccccagaggtctgcacatatcggactctgtggggaccgtggtttggtcttgaccatcttgcaccgcgaagcttggatagctgggcagaaactgggtggagaaggtcctgctagacggaagggcggacggtgaggtgggagacggaagggcggacggtgaggtgggagacggaagggtggaagaaggatgggggaaggattactgtgcttgtggtgtccctagttacacagaagataaggatagccagagtgcagatgagctgttgggtcatcgggagcactggcggtgaacgtggtcacggtggtgatgatggtgacgatggtcacggcggtgatggtgtcagtgaaggcgtaatggcaacgaggatggcgttactggcgatcatgatcttgggagagataaccgtcgttgcgacgacaatgacgtcgtcgtgacaagaaggatgtggccataatgtggagggttattagtgatcatgatgatgctattgtagtaacaaccgtgataatcttggtgacggtgatgatgatgatggagaggacgatagtgatgaggatgaggatgacggtgacggtgaatgttgaagaggacagtgctgatgctcatggtcatggtcacggtgatgctggtgatggaggggacagcgatggtgatgatgacggtgatggtgttgaggatgatgatgaggaagatggtgatgaggagggggatgaggagggggatggcgatgggctgatgatggtgatcatccctgtgacagaactgtgatatggtgaaggagaccctgaaggtgttggtgccagggctagacctggtgacgacagctggcatctggttgtggcgggggtgatgaggatgttggccaggcgaatgccaaggatggtgacagggatgataatggtgagatcaggctccggagcggagtggatggaaaactttttccacgactggctcaggcggctatctacagattcaagccttgcctgccccaccctcctgccccagatgtgggcggggagttactctcaccgtcttctgtttgtcctcaggaaggctatggcctggccctgggcccctccccggtggcagtgggttttaggggactgcctccttaccgagggtggccttgggtgatggccacacctgctcccaccacaggcagcctgagcctgcgggcctggggcggctgtccgtgttcgctggcaacttgacactgaggtcgtcgtgggcttctgtcaaggtgttttatttccatgtgggaaaaagcagtgtccactcagttcagggaccgtggtctcaccgcacggcgctcagacccaagtgaggggctcctttccagcaggggcgtgcggggggctgggggctccgcaggctgctcctgccatggaaatggggcagaacccgtcagtcgctcagtcgacgcctctgccccggtgatggtgccgcctcatcatccgtctctggcctgggtggctctggggtgagcagtgcctatggaggggcccccccccgtctgccttgttccgggtcagggtggctgcctcgggctctttgcagctgaggctgggggtgtctgacgtcctgcctgaggctcctgccttcccaggccccgcccagacccaagtctgaaggagccaagaccctgagccccacctgtgggggacacatggagccctggggggagcctgagggttctgggataggtgggtgagcaccacgcaagtgcagggagaggtgggggtccagtgccggctcccaccggccctggcgggaggaggccaaagaggcaggttgtggaagctgtggccttagctgaagtttcggaagcgaaggggctgtattctgggcccttacaggagtgggtctgggggcctgcagaagcctgatgggggcagggcctgggggctgctgggcagaaagggccctttcctccacttgtgagcggaagtggcgagctgaaactacccctgggctctccccagaactccaggtttggaggtggcagcggtaaccgccatccgcaggcatggctgaggggtcaggccagtaggcatcaggcctggaggcagagggactgaagtgcagcagagggaggggggtaggagggatgaggggagaggaggagtggagaggaaggaagggggcagtggggaggggaggggggaggccggagaggggctaggagggcgcgccgccggcaggtggcgcccgggccctggaagggcctaggatgtcagtggctggtgaggccagaggagaaggcaggggcgggcaggggcgggcaggggcgggcatgggtctgtggggcctgggctgcggcgggaagagccctggcgtccagccctgcatccattcccgagccgatggggcccggcgtccccttgcctgcaggtaagggacaagcactgcctcccgggaggacagccgcccacagggcagtcacgggaggggggcacagtcttgctccagcggtggtgggtggcgctgaccccccggaaggggggctccaccccctcctcgctctgtggccgcacgcagcccgagcccgcagccagcctgcccctgatgccccggcccttgtcttagaggcctgtccccagggcttcccctgcgcagtcccgctctggccagggacgagggaatgtgcccttggatgagtctgtgatgtgggagacgcagacaaccgtcgtgctctgcgctgtgcgtcggtcccgcagttcgtggaccattcccgaccctcgggatactggaagccagcctggagatggccagggagacggaggaagggacagcggccgggtcctgtccagggatggtgggacccatcctgggtccctttctagcccagctctgccatccgcagtggcttgcgggggagcagacaggtgtccccgaaccagggggaggcacagagtaggccagctgggtggcccagaggtcctctccccacctcagagtaccccagcccctctgcactgcgccccccgcaccagggctcgctgccgtccctcccaaacttcccagccagccacctgcccagacgcagaccttaagaccaagaacgcagaatgagcgacgtgggttgtgaacgcaccctccggatgagcctctgcagagggacgcctgccggctcagaggccaaggcccagacgctgtcagtcccacgctgtccacggcagacaagagtacacgaggtgccaggaccgctggtcgggttcccggcaccccaaccccccgcccagcgagtccgaggttcagggagatgctcagtacacagcagtgccccccgccacgtggtccctgtgtccgccctcttcagacaggccacagagcagcagaccccacccgcaggatgggaaggaaccctggtgggccggactggctgtgtgagtggcggggtccgcggcaaaatggaaacggggcctttcattcaaagttagcatgaaccgcaggacagctgcggcagaccatggcctggggcccagagacaggggaccagggacagatgccatcaaggcacccctgtgggcctcgcagcagaggcggggggagggggggacgagctcacgtctggagaccaggtggccttgagggccaaaaaccatcacggctcccacctggtgtccgagagctgcggcagacagggagggccccacacccatgaagcaggagtgggggaggacgccgggcgtccgcatggggcagctgtggggccaggatgtcccatacctgggacatccgtgtcaggtcaagaccccaggagggaggtctcacccggacaagatggcccccccagacctcctcctggccccaggggagggacgggaggggcagaagggacactgagccatttccggcaggggggcagggccgggcaggggtccctccagggcgccccacccagcaggcagaacgcagagcctgtgtgcgtgggggagctcctggctgcgtcacacggagctattctcagccccgctccttgtatggctccggaagtgtgcctgggagccggcgctctgtgctggggagcgagctaaatggagagacccagagcagcaggaaagttggccgccaccccctccctggacgtcctgaagccccagctccgggggagtccggccagggccagctggcagcacaccccccatccgggcggaggggcggccacgctcggggggtcctgccgcaccagctgctcggagtgtccggggaggcagcgggggcgccctggctgggggcccagtggggcagagaggagggggcggccacgggctcccacccccacaggcgggctccccgccgcgcctgccgcgtcctcacagcgctcctactcccgactgccggcacacggggaccccggctctcccctcattcccgacccccctcgggccctcagagacggtgccttctcccacccacggctcggctctccagcggcctctgcccccgcccaagccactgtcctcctgccaggccaaagacccaggtcggtggcctcagtccccaccttaggacctgtcccctctctagtaaccctcccctcctggctctgcccctggtgagggcagcacccagaaatcctgtcctccctgccctgcgcggccccctgcagccagcccacctgtgctcggcctccagctctccccaccctcagggctcctgtggccgctggctccggaacacctggggtgccgggaagcgagcggtggctctcgtcccctccacgggcccagcacaggcccagtgggcgagagcatgcctggctgggacagatcaggggggccctgacgcgtgcgcacacacacacacacacacacaccacaaatgcgcgtgcgcacacacacatacacgttcacactcataagccgacacagagaggaagacatcgtgctcaggggctctgaggcagcacggacgagggacaaggccacaaaagatccagttaacaaatcgccaagaggctgggaaggcttcttggaggcggtgacaatggactcagatttagacaacgtgtaaaaccacgctgagtttgggggctttgattttaagaccaaataggcctttgtcattggaatcaggggtgacgtgccacgggtcagatagggcattcatggtggggtgaacagggcggccagaggtccggcccactcctcgtcaccacccaccgctgccgtcaggctccgagccgcccacgctgagaccctcagtctccactcggtgcagcgcgcaagggcatgctgaggagggcgctggggccagagggcctgtggcatctgcagggggtcgcggcacctcgaggagaagagggcacggaagcagggccccagtgcccgtccagtgctctgtggacgctcagacccagcccgaggcacctgccacgccaaggggacatttgagacccagacaccatgtgggcgctcagacggcgagccgcgtgtctgcagcgtgtcctgggccccccctccctgtccggggttctcaccgccccccggccctgcagtagtctccctcctcccctggtcctggctcggccgggaggggatctgccctgattccctggagggcaagagcccgagccttggcgcccaggcctgacctgcaggagcccgccgttccgagggcggtgacccagcggatggcatgcccagagccacaagcagcccgggtcctcctgggccccatcctccagggccggcgtgcgggtcagggtgatgtccctgcttcagggggcgacccgcgctcccctgcggcccaccttccttagcgcctgctaaagctcccgggctcgggagctgctctgggtgaaatggctgactcgccccccacccccggggttaagtagagccaagctttacccggcagaaggcaaatgcccagaaggcgcaggaatgagagaacttacccaccgttgcccggggtgcagactgagctcacagggtctccgggagcctgcaggccttgccccccacacagtgccctggctctggcccccttgccatggagcttggacacgttcctggctctctccggggctcagtttcccccttccgtcctggctgagggcagcagtgagggcagtctccagggcctggggcgtgacctcctggccctgggggaggggggacgcctgcagggcacagggagcagctggcttggggccctcggtgccagcctcattggaaaaatacaaactttccttggagctccgggtggggggaggcgctgaggcaggaggcaggaaggagggagggggagagggtctggtgtgtgggggcccagaacgaacaggctgcctgttccagggacaggacgccgcacacacaccctgccaagccggagacaagaggaagtttggggggggggaggattggaaagaagatgttccctccgctctgggcgctcagtcggagctccccccagccagacacctctgcctcccctgggcccccccggcccgtgctcagcaccccatctcaggtctctcgggcatgcgtgtggccacacctgcgcctggcgctgacgggctcctgccaccgctgcccgccccccaccaccctggcctcccggactctctcagaggccacctggctactgcaggtgcaaggggcaggtgtggccgggggaccccacctctcacttcccagctgaacggcccggggcaggacccctgcctcttagagcctctttgaaatcagggcgaaagtgtctccttgagaaggacatgatgcccttgtgctcccgctctcccggcgcccccctttctctgggcctctgcccacccgttccgccttcctctctgcctggggccgggtctcacctctgccgccctgtggcccagaccttggccctgtctctgcctccccaggcctcctctgtggcccggcctccccagggcccagctccgctaagggaagcacccagaggacagagaggcagaccaggcgggcagggcagggtgggagcggggggtgtccaggtgtccccctcccagcctgggctcccatcccagggccggccgccagccgctctccgtgcctctgctgtccccacaccgccggggcctgcgctgtaccccccccccccgcccccaagcagccatccccagcccccagggcggacacagcaagcaaggagcaaagcagacccctcctgaggagaagcaggggagggacctgggcctgcagaggcccccccaccccagggaatccagggcggtcctcatccttcctcccaccgcactggagtgaggccacaggacccaggagggggcagggaccacaggccggggccaagctgggcaggcagggccgggtgagtcgcaggcagaccccagcggtccagctcctactgcagaaggacagggtcctggagcccgtacagcagtggccctggtagaggaggaggcagaggaccgtcggcgggagggagccctgcccgcccctgcctaccccctcgcccccacggagctggagctcacaccctgggctctaagggctgctcactgagcaccgctggagatcgcctggcgactagctgggagggaggccccgggtaggcagggggaccctgaaggtcccagggctatgagtccccaggcctgggtgagcagtaccccagccctctgacccagggagccaggcagtgggacagggggcctgccgtcaggggccccagaggcaggtgggcgccaggcaggaagggaccagaggaccgggccacaagccaccagtgcccgcgggaggctggtcctctggaggctgcggccctgtttagggtgcggtggggggtgtgactccctgaggctgtgcatctgggagggagacttcctctccaaataggcctcttagccccacagaccagcacctggggtctgggagcccagaaccctcgcaccagaagattggaaccccaaaggggcctgaatggggggggggggcgttgctgcctggagcccagcatcgggcagccctcccctgtggtcgctctggcctgccttccctgccacaacagccccctcctaaggccatccaaggagcacctgatcatctctgctccgaggctccccacccctgttcagcttcccctccctctccctctcccccactgcagccctcaactgccctgctctgggtgaggcagggggcctccagcccttcaccccttcacccctgcctgcggagaaagggggcggcggagcagggcgggatagaccccccccatcccgggaggtggggagccagcctgacctcttctccgaggcagcagaacagagcccgaggcccagtgcgggggttgctgagggtttccggggcgataattgggcagcgatgaagtgttccgagcagaggctgactcctgtgtcacctgtgatggccagcacagcgcagcctccccccaggtcctgctggctctccgcgtgacccaccagcatcccccttccgctggaccccgcttcctcaggcccgtggcgggctgctccagcccccggagagggggtgccgaggggccggagtctgaggtcctctccccaacccggtccccccacaaaggggagtctcgcccacccccagcatctctagcgctgcgctgctttcctgggtctggtcaacccctctggccctctaggtaccagccgggcaccgcactccaggaagccgtagccgttgctggcctgggtccgctggagcgggggctggaggtcaccccggccaggggctgcccagctgctcaggggacctgggcccgagtgtcatcctcaggggtcatgcggtctttgtaagctgctggtcattcgggggcaggctctctggcaccccccccttcacacgcctttacatgcctgcacacacacgcacacacttgcacacacccgcgcacacccgcgcatgcctaccacacacgggcatggagggccgtaactgcccagctggcttatacggtgtcttccccgacactggccctgagacacaagcccgagctcaccccagacgtggacacacactcagggctccctgcaggccccgaggtgaccggccagccacactgtgggcctggccacacgccgcgccccacagacccggcacacaggggcgcagccaggttcccaggaatgcagccagggctgggcagatctgggattcctgttctcgcagcttctctgcctggctccccctccctcctccactccgcccctcctccctcccttccagcccacccacttgcctttaattagaaatgccaggagagtggttttgggcaagtttttgccagaaagacatttccccccagctaggggtggaagcttagagggggaaagagacagattggctctggggtagggaggagggtttccaggagagcagggagaaggggcctggtggaggggcagcaagtggggatcccagagtgtgtgagtcagacagaggggggctggacacggatcggggaccagtggggggtatgagtgtgtctggaggacggctgggcggggggggggtatgagtgtgtcttggggatggtgggtgggggaatgagtgtctggaggatgggtggggggatgagtgtgtctcagggatggtgggtggggggatgagtgtgtctagggcataggtggggggctgagagggggagtgggaaagtggcagcagggctggggtttggactcactggcgagcccccggctctgggcacgtgtgcaccctgcgcccgcataaagtcggaggacctgggacccataaccctccatcctggggtaacccagaaagggtgtccctcccccaccactgttgccagggaggcagaaggggcctccctcccgagggaatctcggcttccggagccccattccttatatggtgcttttctctgcctctcctgactgcataaggctgccagcaccccttccgtccgccaccgcctcctcctctcctccttccttccccctccaccctcctcctcctcccctcctccccttcaccttccttcccctcctcccccttcaccttccttcccctcctcccccttcaccttccttcccctccttctcctcctcttcctttccccctcttccctccccctcctcccttcctccccctcctccccccagccctcctctatcctctcagaagtcttagggcctctgacccgggtccctctgtggcctggaaggttcaggtaccaggaccccttcatctcctccacatccgttcccccaccccgacaccccagcccgcagggagcaggttccagatttctctgggggcactacgtggagaagtcctgggcctcaccaaagctgtgggagtggggtccccaggcagtcctgtccagccattgccaccctggtgtcacggccacaccaccgccaggggtccagtgcggccgagccaaggcctgagggctcgtccccctcacacccaggagggaggaccagcccggctcccggacgtgagagcccccagggcaggggtgggcaggagctagaggccacacctgggaacccgcaccggactcgggcgggcttgcccttgtccaccgcaggaaagctcctcgcagccttcagctcccgggagggagggtctgcatgggtgtccgggggtcgccagaccgcgccggactgggcacgggcactgaggccccgggagagcggagtcgagcaccaccccgccccctggagaggacggagactggaggggaggggagggggcccgccccagaccccggggaggggcttcctcctaacctttgggtgggtgggcgcagctcaccacccgctccaggcccccgcggaatcacacctgcgccccccacctccgccggtcgcgggcagggggtgtcgccggggcccggcaccgtccctcgccccgcaggctggatgagccggggagggggcgtccgggcccgcaggcggattagtcacccgggccgctggcgcgtgcggggggcgggtcctcccggggcgccgggcgcgcgggcgggcgcggggggcggggcgcgcggggcggggagcccggcggggaccaatgggagcgggggctcggcgaggggccgcccacggccgtgcggccgcataaagggccggcggcggcggcagggcgcagagctcggcgccgcggctccccgctcctcgccgcctccccgcgctctcccgcgctccgccgccgccgcagccgcagccgcagccgccgcagcgccgggaccgaagggaccctcccggctgcaccgcaccccggccagcgagacaccgcagcccgccgcggccacctgcgcaccgatggagctggaccacaggacgagcggcggcctccacgcctaccccgggccgcggggcgggccggcggccaagcccaacgtgatcctgcagatcggtaagtgccgggccgagatgctggagcacgtgcgcaggacccaccgacacctgctgaccgaggtgtccaagcaggtggagcgggagctgaaggggctgcaccggtcggtggggaagctggagagcaacctggacggctacgtgcccaccggcgactcgcagcgctggaggaagtccatcaaggcctgcctgtgtcgctgccaggagaccatcgccaacctggagcgctgggtcaagcgggagatgcacgtgtggcgggaggtgttctaccggctggagaagtgggccgaccgcctggagtccatgggcggcaagtacccggtgggcaacgagccggctcgccacagcgtctcggtgggcgtcgggggtccagagggctactgccaggaggccgacggctacgactacacggtcagcccctatgcgatcacccctccgccggctgccggggagctgccgggacaggagcccggggaggcccagcagtacccaccctgggggaccagtgaggacgggcagccgagccccggcgtggacacgcagatcttcgaggacccgagggagttcctcagccacctggaggagtacctgcgccaggtgggcggctcggaggagtactggctgtcgcagatccagaaccacatgaacgggccggccaagaagtggtgggagttcaagcagggctcggtgaagaactgggtggagttcaagaaagagttcctgcagtacagcgagggcacgctgtcccgggaggccatccagcgggagctggacctgccgcagaagcagggggagccgctggaccagttcctgtggcgcaagcgggacctgtaccagacgctgtacgtggacgcggaggaggaggagatcatccagtacgtggtgggcaccctgcagcctaagctcaagcgcttcctgcgccaccccctgcccaagaccctggagcagctgatccagcgaggccgggaagtgcaggacggcctggagcaggcggccgagcccgccggcacccctgtccccaccgaggacgagcccgacgccctcacgccggccctcaccagcgagtccgtagccagtgaccggacccagcccgagtagaggccggcccaggccccggcctgcccaccgcaccccacctgtggccttcgccagccaggactgttgagccgggctgacccctgcacgggggagcccctcttcgtcacccggctgggcacccgacctcagc

SEQ ID NO: 30 - DNA, 3335 bp, Mirounga angustirostris
tcggcgaggggccgcccacggccgcgcggccgcataaagagccggcggcggctgcaggctgcagagctcggcgccgcggctctccgctcctcgccgctcctccgcgctcttccgcgctctggcgccgccgctgccgccgctggaccgaagggaccgtcctggctccaccgcacggccggtccacgaggactttgccgcctgccgcctctcgccagtccgatcgccgcggccacctgcgcacggatggagctcgaccacatgacgagcggcggcctccacgcctaccccgggccgcggggcgggccggtggccaagcccaacgtgatcctgcagatcggtaagtgccgggccgagatgctggagcacgtgcggaggacccaccgacacctgctcaccgaggtgtccaagcaggtggagcgggagctgaaggggctgcacaggtcggtggggaagctggagagcaacctggacggctacgtgcccaccggcgactcgcagcgctggaagaagtccatcaaggcctgcttgtgtcgctgccaggagaccatcgccaacctggagcgctgggtcaagcgggagatgcatgtgtggcgggaggtcttctaccggctggagaagtgggccgaccgcctggagtccatgggcggcaagtacccggtgggcaacgacccggctcgccacaccgtctccgtgggcgtcgggggtccggagggctactgccaggaggcggatgcctacgactacaccgtcagcccctacgccatcaccccgccgcctgccaccggcgagctgcccgggcaggagcccgtggacgcccagcagtatccgccctgggggcccggtgaggacgggcagcccagccccggtgtggacacgcagattttcgaggatccgagggagttcctcagccacctggaggagtacctgcgacaggtgggcggctccgaggagtactggctgtcgcaaatccagaaccacatgaacgggccggccaagaagtggtgggagttcaagcagggctctgtgaagaattgggtggagttcaagaaagagttcctgcagtacagcgagggcacactgtcccgggaggccatccagcgggagctggacctgccgcagaagcagggggagccactggaccagttcctgtggcgcaagcgggacctgtaccagacgctctatgtggacgcggaggaggaggagatcatccagtacgtggtgggcaccctgcagcccaagttcaagcgcttcttgcgccatccactgcccaagaccctggagcagctcatccagaggggcatggaagtgcaggatggcctggagcaggcggccgagcccgtgggcccccgcctccccaccgaggacgaggccgaggccgaggccgaggcgctcacgccagccctcaccaacgagtctgtaaccagtgaccggacccagcccgaatagaggccagcccgggccccagcctgcccaccacaccccgcctgtggcctttgccaaccaggactgtcgagctgggctgagtcctgcacagcggagcccctcatcctcacctggctgggcacccaacctcagcctcccagcctgactcacacagacacatgtcatccagctgtgggcagtatcccccaaacagcgaagggcccctgccccgtcaccctccttctgtctgtcttttccggtctctgaccccatcctgcacactctctggccaccccaggacctcccagcatcggtattctgctcaacccccagggccccctgggcactcagaaatcaatgtccagatggcccaggccagtgaaccccgagcccaagggacaccccagagcagaagctaagacagcagcagcaccacaggaatcttggctttggggcgccgccttcccctggcagttgctgtgcagccggctggcgctcttgcgctgcccagggcagccggccagccgcaggcagcgaggctccctcctgctgccgaaagccagagcctccggagcgaccgaccgctgcggcggcagccccgcgacggccgcagcagacctggcgtccgggtgcctcctggctcctcaggtgagccccggccccaaggcacccccgccagggggcactgtgggggagggagggccccggggccaggtcagccccagcaggttagctgcagggatgggttgggggcgggggggggctgcagcggggagttgtggggaaggaatcggggagaagggccgggcggggcggcggggcggtgggacggcggagcctgctctcacacgaccccgtgctctctctctcctcagcaccagtgatccaccccagcctggaaaaggatcgctgggctggatgactcacccgcagccgggggagggtctcacggggcctgagtcctcaaactcagctgaggagccaggagagtgacgacaggtacagcccgctctctccactgagaccctgtccctgctccccccaccgcaggatcccaggccctgcgccccccaacacagtgctctgggcaagctgagaggcagcccagcatgggggcttggccctgggggagcagccccatagtgtccatcctgtacccctcctgtgcagcccctcccagcctgtggcctgtctctgaccacccccccaccccgtctttctttcaggtctcaaggctcccacagagctttcgctgcggcgcctggcctgcccctccctctcctcctgcaagctgcccacacaaggagacgctgaggtccgcagagttgctgcagagagggtgggcccggcagagagctggtgatgaagacgggccagcgtgagggccagggcctgccactaggcctgccccgctgaccaccagcctgcctgcccccacggccgctgtggctggaggtggggtctgctacctcgggccctgtctcactccagcccaggaacccttgcccacggcacggcggccatcctctcttgccagagctttccaggagctctgaggctgaggccccagccccagccctgcccgcagccccaggcccagccccaggagaccccagaagccttgcacctggggcttaggcaggctctctgccaggccccgccatagccggggcccagacccccacctcccccggcaccaatgccccagtgctggccggccactcgtgtctgcagcccgagcaggccctggctgggggttctcctttctgcctgtccagtgggggttcccacattcaggggactgatggctgcaggtgactctgtcagcccctccatcctgcacccctgccagcccccccccagattttatttttgcacataagccataacccatactcataggctggcatagg

SEQ ID NO: 31 - DNA, 3522 bp, Phyllostomus hastatus
gctcacggggcgggcgcgcgggccaatgggagccgggactcagcgcaggggccgcccacggccgcgctggcagcataaagagccggcgcgcggcggcaggctgcagagctgggcgccgctgctcccgcaccgccttcctgcgcctctcccgccgccttcccgagctgctgccgccgccgccgccgcggcaccagacccagagcgactcagcctccgccgccccgccagacttgccgctgccggcgcgcccgcacctgcgcacggccggaccccgaagccccaccggcccaggaggactttgcagcccgccgcctcccgctcgtcccagcacctgcgcgcaaatggagctggaccacaggaccagcggcggccttcacgcctaccccgcgcctcgaggcgggcaggtggccaagcccaacgtgatcctgcagatcgggaagtgccggaccgagatgctggagcacgtgcggaggacccaccggcacctgctggcggaggtgtccaagcaggtggagcgcgagctgaaggggctgcacaggtcggtgggcaagctggagagcaacctggacggctacgtgcccaccagcgactcccagcgctggaagaagtccatcaaggcctgcctgtgccgctgccaggagaccatcgcccacctggagcgctgggtcaagcgcgagatgcacgtgtggcgggagatcttctaccggctggagcggtgggccgaccgcctggaggccatgggcagcaagtaccaggtgggcggcgacgcggcccgccacaccgtctccgtgggcgtcgggggcccggagggctgctcccaggaggccgacggctacgacttcccggtcagcccctacgccatcactccgccgccggccgccggcgagctgccggggcaggagctggaggaggcccagcagtacccgccctgggggcccggcgaggacgggcagcccagccccggcgtggacacgcagatcttcgaggacccgcacgagttcctcacccacctggaggagtacctgcgacaggtgggcggctccgaggagtactggctgtcgcagatccagaaccacatgaacgggccggccaagaagtggtgggagttcaagcagggctcagtgcggaactgggtgcagttcaagaaggagttcctgcagtacagcgagggcacgctgtcccgcgaggccctgcagcgcgagctggacctgccgcagaagcagggcgagccgctggaccagttcctgtggcgcaagcgggacctgtaccagacgctctacgtggacgccgacgaggaggagatcatccagtacgtggtgggcaccctgcagcccaagctcaagcgcttcctgcggcacccgctgcccaagaccctggagcagctcatccagcggggcctggaggtggagggcggcctggagccggggtcggagaccgccagcccccagccccccgccggggacgaggccgaggccgagccggagaatgagagcaacgaggcgctcacgccggccctcaccaacgagtctgcggccagcgaccggacccagcccgagtagagggcctggcggccccggcctgcccgccacaccccgcctgtggcctttgccaaccaagacttttgagccgggctgacccccgcagggggagccccggtcccccacccggtgggcgcgctgccaccagcctcccagcccgattctcacagcacacgccgcccagttctggacagcgtcccccacacagtggaggagcccccgtcccctgcagggccctgcccggcccctcccttcctccctccgtcggtcgtccagggcctgggcctgcccgggccaccccccgcccctccgccccacccaatagacccactctctcaggccaccacagcggtctccgcctcctcagcctgctccgcgcctgggccctctgggcccgcagaagccacgaggccctgtggcccgggccagcaggcaccacgctcactcgggggactccctggagcagaagcaaaagcccggtgccccgtgcccggtgcccggtgccgtgagacctcacctccgggccagcgccccctcctggcggtcgcctcacaggccggccagcccgcccgcctcggacagcacagtgtggctccgtgtcctaggggacacccgaagctcaggcacagcctcagcagccgcagcagcagcagcagcagcagcagcagacctggcctcctggtctcctggccgctcaggtgagcccctgcatcagggcacggccgctaggggtcgccacagaaccaggagggcccagggccaagtccctgttcccggccagcccacagagcctcagaggcaccccagcaagcccgccgccgcggggctggggtgggggcggcagcgtggagaggcgggagggcgcagagaccgcggggccagggagaggggccgggtgggaggcgggccgggggaggctgctgagccagctctcacagtgccggtgctcctctcccgcaggggtgtccgtgactcacgccagctcagcgggtgactcagcccccggcaggcggggggtccccagaggcctgagtccccgaaccggctgaggcagccgccggtgtctccggagccaggagagctacaacaggtaatggagccccaacccccgcactgagactcggaccctccgctgcactcccccgggggccttggggtccctccccagcccctgcccctgcccctgccccaggcctccgggccggcttgggggcagccctccagggtccccgggtcccgggcccagggagcagccctgctctgcccttcctgcccctgaccatgctgtgtcttccttccaggtccccaggctcgcccagagccctgctgctgtgcccggcactgcccgctgcccgctcctcccaccagctgcccgcgcgggaggagccgtctgaggccccagaggggctgctgcagagaggaggggccccgggagagcgcgccgaagactcccggcctggaggccagggcccgccgccctgcctgccccgcctgccggcccccaggacctctgtggctggagccctggccccacaccccgggccccgccttgctccggcccagcagccctgctcgctgtgcggcctctgcccccgccagagcttcccgagagccccggcccgaggccaggaggccagccccaggacaccccaaagcctcgctcctggggctccagctgctctgccagccgccgctgcccaggccctgaccgccccccaccccagcaccagaaccccggtgccgcagagcccggcctgtttggggggcccgctctgcctgtcccctgggggctcccagattcactgatgacaacgtctgcaggtgaccgtcggctccttcactctgtgctcctgccagccccccagattttatttttacacatgagccatagcccgtcctctcaggctgcggggggccccgggtccccccgcccccacagacccagcctggagggccctgccaggctggggccccctccctgagg

SEQ ID NO: 32 - DNA, 3457 bp, Lemur catta
ctccccagcggcagagccggccctgccgcgacagacggacgcgccctcagctccgcacggatcccggacgctactgggacacacgcggacccaggcctcccgggcaccgccagcagctcccgcaacctccctccgtctgccccaagaggactttgccgcctgtccggagcgccctgccacctgcagcagatggagctggaccacatgaagagcggcgggctccatgcctacccggggctgcggggcgggcaggtggccaagcccaacgtgatcctgcagatcggtaagtgccgggccgagatgctggagcacgtgcggaggacccaccggcacctgctgaccgaggtgtccaagcaggtggagcgcgagctgaaggggctgcacaggtcggtgggcaagctggagaacaacctggacggctacgtgcccaccagcgactcgcagcgctggaagaagtccatcaaggcctgcctgtgccgctgccaggagaccatcgccaacctggagcgctgggtgaagcgcgagatgcatgtgtggcgggaggtgttctaccgcctggagcgctgggcggaccgcctggaatccatgggcggcaagtaccccgtgggcagcgagccagcccgccacaccgtctccgtgggcgtggggggtcccgagagctactgccaggaggctgatggctacgactacagcgtcagcccctacgccatcaccccgccacccgccgccggggagctgccagggcaggagccagctgaggcccagcagtaccagccgtgggggccgggcgaggatgggcagcccagccccggcgtggacacgcagatcttcgaggaccctcgggagttcctgagccacctggaagagtacctgcgacaggtaggcggctctgaggagtactggctgtcgcagatccagaaccacatgaacgggccagccaagaagtggtgggagttcaagcagggctcggtgaagaactgggtggagttcaagaaggagttcctgcagtacagcgagggcacgctgtcccgggaggccatccagcgcgagctggacctgccgcagaagcagggcgagccgctggaccagttcctgtggcgcaagcgggacctgtaccagacgctgtacgtggacgctgatgaggaggagatcatccagtacgtggtgggcaccctgcagcccaagctgaagcgctttctgcgccacccgctgcccaagaccctggagcagctcattcagcggggcatggaggtgcagggtggcttggagcaggctgctggagccggctggccctcacgcccccactgaggacgagtccgaggccgtcacaccagccctcaccaatgagtctgtagccagtgaccggacccagcccgaatagagggcagccggagcccccagcctgcccgccacaccggcctgtggcctttgccagctgggacttttgagctggggctgactcctgcaggggaagctctcgtcctgctgggggccctgctcggcctcccggcccaactcttgcacacacgccatccagatgcgggcagtgccccaaatagcaaaggagcccctctcccctgcagggctctgcccctctccctcccctccatctgtctcctcagtcctggcccaccctccacactcaggccaccgcagaacgtccccagcttcctcattctgcttcaatgcctgggccctctggacactgagaaaaccaagtgtctggatggctgtggccagcagtcactgtgctcacagaacgccccagatcggaagctaaggcagaaccagtgcccaggaaacctcggcttccggcactgccaccctctcctggcatcaccagagccagccggcgccctccctgcctgccagggcagctggccagccccgggcagcctggctccctcctccccggagagccaaagccgcatatgcagcagcagcagcccggatgtcctggtgcctcctcgccctcaggtgagcccctgccccaggcctcatagagctgggagggcacagggcccagaggccgttttctaggtgggcccactgaggctcaaaggcatccccagcaagttagcagtgaaaggatgggggtggtgctgtggggggggagcagagagacaggggtcaaggagaggggtggtgggaggcagggctgagggagtttgctgagccagctctcacagggacccgcactttctctcgccccagcaccagtgattcatgccagcctggagaaggagcagagctcggctcgatgactcaccgtggcagacagagggtcccagaggggctgagtcctcaaatccggctgaggcagcagccggcaccctcagcaccctcggagccaggagagtgacagcaggtaatggagtgccatccctccggccagacccactcctcagctgtcctgaccaggaacagctcttccccaggccccggccccaggccactctccagtgctctgggcaagctgagagcagccctgtctgtccagctccagcccctccctgtggtgccctggctgctgtccctacactgtccctgactgtcccatttcttcctcattctttcaggtttcaagactcccacaaagtctttgctgctgtgtctggcaccgccactgccctctcatcttgcaagctgtctacacagaagtcccaggacagccaagagagggaggctgcagacagaaggcggctgtggccgaggcagcatccccagctcagccctgagagctggtaggaagacaggccagcatgagggccagggcctgccgctatgcccgccccgctggctgccagctgcccgcccccagagccactgcagcaggagtcggagggcagctactctaagccgtacctccctccagcatgggaacccctgcctgctgcatggccattgtctctgccagagccctccaagagccttgaggctggggccactgctcctgctcctgcccacggcccaagccctgcctaggaggtcccggaagcctttgttcctgggtgattccaggcactctgcccaggctggacccccaccccctgccccagcaccaacaccctggtgcgggccatttgcatctgtggcccaacaggccctgcttgggggttcctatttctgccttgtccactggggtttccagattctggggaagcaactctgcagacaactccaacaggtcctccaccctgcacccatgccagcccccccagattttatttttgacataaaccataacccatactcataggcataggctgcagagaagccgggcctgaggagaccctggggacctcaagagggtgtggccaatcctcccttccccctctccccctcccgccaccaagatcaggccttgactgtctagccaggctgtgtgcacccctgccatcttaccctgaagacagactctttttctaagattttgttaataaaacactgaaacttc

SEQ ID NO: 33 - DNA, 3450 bp, Leopardus geoffroyi
ggccgcagagctcggtgccgccgctccggccgctctccgccgctctccctgcgctgcccgcgctccccgccgctctccctgcgctccgccgcgcccgcgccgaggacaccgaggacccggctccaccgcgccgccggcccaggggcacttcgcagcccgccgcctcccgcccgtccgagcgccgcggccacctgctcactccctccgatggagctggaccacatgacgagcggcggcctccacgcctaccccgggccgcggggcgggccggccgccaagcccaacgtgatcctgcagatcggtaagtgccgggccgagatgctggagcacgtgcggaggacccaccggcacctgctgaccgaggtgtccaagcaggtggagcgggagctgaaggggctgcaccggtcggtgggtaagctggagagcaacctggacggctacgtgcccaccggcgactcgcagcgctggaagaagtccatcaaggcctgcctgtgccgctgccaggagaccatcgccaacctggagcgctgggtcaagcgcgagatgcacgtgtggcgggaggtcttctaccggctggagaggtgggccgaccgcctggagtccatgggcggcaagtaccccgtgggcggcgagccggcccgccacaccgtgtccgtgggcgtcgggggtcccgagagctactgccacgacgccgatgggtacgactacaccgtcagcccctacgccatcaccccgccccccgccgccggcgagctgcccgggcaggagcccgccgaggcccagcagtacccgccctgggcgcccggcgaggacgggcagcccggccccggcgtggacacgcagatcttcgaggacccgagggagttcctcagccacctggaggagtacctgcggcaggtgggcggctccgaggagtactggctgtcccaaatccagaaccacatgaacgggccggccaagaagtggtgggagttcaagcagggctccgtgaagaactgggtggagttcaagaaggaattcctgcagtacagcgagggcacgctgtcccgcgaggccatccagcgcgagctggacctgccgcagaaacagggggagccgctggaccagttcctgtggcgcaagcgggacctgtaccagacgctgtacgtggacgccgaggaggaggagatcatccagtacgtggtgggcaccctgcagcccaagctgaagcgcttcctgcggcacccgctgcccaagaccctggagcagctcatccagaggggcaaggaggtgcaggatggcctggagcaggcctctgagcccgccggcccccagctgcccgccgaggaggaggccgaggccctcacgccggccctcaccagcgagtctgtggccagcgaccggacccagcccgaatagagggcggcccaggccgcagcccgcccgccaccccccacccgtggcctttgtcaaccaggactgtccgagccgagccgagccccgcgcgggggagccctcgtcccccgcccgctgggcaccccacctccgcctcccggccggactcgcacaaacacgcgtcatccagacgtggacactctccccccacccccccagcagcaaaggagccccccccccatcctgcggggcccctgcctcgtcacctgcctttctcctgtctgtctttcctggcccccatccgcaccctgcacactctcaggccatgacccgacttccaggctcccttattccgccccgcgcctgggccctccgggcattcagaggtcaagtgtccgggcggcacaggccagtgcgcaccaagctcgagggacaccccggaacagacgcgaagacagaccggtgccgccggaaccctggcttcggcgcgctgccttctcctggcagtcgctgcgcggccggctggcactctcgtcgccgcctcgggcagctggccagcctcgggccacgaggcccctcctcctggaggacagctgaagcgtaagacgcagcagcagcagcagacctggcgtcctggtgcctcctggcccctcaggtgagcccctgacccacggcaccaccccgggggggggggggcgctgtagagtagggaggacccagggcccgtccattttccgggtgagcccactgaggctcagaggcatccccagcgagttagctgcaggggtgaggtgttggggggctgcagcgcagagcggtggggaaggagcggagaccccagggatcggggaggagggctgggggagtgctgagccagctctcacacgacccgacccggtgctttctcctcagcatcagtgattcacaccagcctggaaaaggatcggctgggctcgatgactcacccacggcaggcggagggtcccacagggcccgagtcctcacactcagctgaggagccgggagactgacgacaggtaaggggccccatctctcccaccgagaccctatccctcagctgtccttcccgggaccccaggcccggcggcccccagcggcgctctgggcaagccggggggccgccccataacgtccacccacacccttcctgcggagctcctcccagcctctggcctgtccctgacccccccgtgtctttctttcaggtcccaaggctcccacagagtctttgctgcttgcctggcacttcccctccctctcctcctgcaaagctgcctgcacacgaggagacgttgaggtcggcgagaggggctgcagagaggacaggcccggcggagagctggaggtgaagacgggccagcgtgagggccagggcctgccgccaggcctgccccgctggccaccagccctcccgcccccaggtccgctgtggctggagtcggggtctgccaccttgggccctgcctcgctccagcccgggaacccccggccacggcacggcggccgtcctctcctaccagagctttccgggagctctgacgccgaggccacagcctctgctcccgcccgcagccccaggcccgcagccccagcagtgcccagaagcctttgcctctggggcttaagcgggctctctgccaggccccgccattgccagggtccggacccccacctctccaaacaccagcaccccggtgcagactggccactcaggtctgtagccccagcaggccctgtctgggggtcctcctttccacctgtccagtgggggttcccaggttcagaagactggtgtctgcagaagattctgtcaacccccgacatcatgcactcctgccagcccccccagattttatttttgcacataagccataacccacactcacaagctggcacgggctgcagggaggccccagggtcctcaagagggtgtggccagccctccctgtccccagtggatcaggccttgatgtcaggccaagctgtgtgcagccccctgtcaccttccctgaagacagactttttaagtttttgttaataaaacactgaaacttc

SEQ ID NO: 34 - DNA, 1310 bp, Mauremys mutica
cctaaattaaaagccccggagtaaccactagggctttgcctctagttctgttgctttgctgcttggtttaacctgctcacgccacaggtaccatgcagctggatagcatcaccaatgggagcgtccacaccttccaggggcaccgcggagtagccaataagcccaacgtgatcctgcagatagggaagtgcagggctgagatgctggagcatgtcaggaggacccaccggcacctcctcacggaggtgtccaagcaggtggagcgggagctgaaaggcttgcagaaatcagtggggaagctagagaataacctggaggaccatgtcccatccacggacaaccagaggtggaaaaagtccatcaaggcctgcctggccagatgccaggagaccattgcccacctggagaggtgggttaagagggagatgaatgtctggagggaggtgttcttccgcctggagaaatgggcagaccggttggagtctatggggggcaaatatggccccacagaccatgccaggcagactgtctctgtcggggtgggtggcccggagagcaggggcaatgaaggggagatttacgattacgcccttgacatgagccagatgtatgcactgactccctctcccggggagataactagcatgccccagccccacgactcctaccagtggatcactgccccggaggatgttccagcctccccggtggagacccagatctttgaggacccccgggagttcttgagccacttggaggaatatttgaagcaggtgggagggactgaggagtactggctctctcagatccaaaaccacatgaacgggccagctaaaaagtggtgggaatacaagcaggattcagtcaagaactgggtggagttcaagaaggagttcctgcagtacagcgagggcactttgaccagggacgccatcaaaagggagctggatctaccccagaagcagggggaacccctggacgagttcctctggcgtaagagagacctgtatcagacactctacactgatgcagaggaggaggagattatccagtatgtggtaggcaccctccggcccaaattcaagcgcttcctgagtcaccctttgcccaagaccttagagcagttgatccagagggggaaggaagtcctaagtgacttcgaccagtcagaagagccgaccccgcagagaaccccagagcatcagccaggggactcagttgatagcttgccgccttcaaccacagctagtcccattgccagcgatgagacgcaacccgagccccctaccccaccagctacggtgatatga

SEQ ID NO: 35 - DNA, 2066 bp, Equus asinus
cctctcctcccgcacagccgcagctgtcgcaccgggacgcagccgggacccagccggaccgagcgcgctccgcaggactcagcgccacaggcatctccgcacagccggccgccagcaacccctcctcagccccaagacgactttgcagccctctgcctcccgcctgtccgagcgtcgcggccacctgcgcgcagatggagctggaccacatgacgagcggcggcctccacgcctaccccgggccgcggggcgggccggtggccaagcccaacgtgatcttgcagatcggtaagtgccggaccgagatgctggagcacgtgcggaggacccaccggcacctgctggctgaggtgtccaagcaggtggaacgtgagttgaaggggctgcacaggtcggtgggcaagctggagagcaacctggatggctacgtgcccaccggcgactcgcagcgctggaaaaagtctatcaaggcgtgcctctgccgctgccaggagaccatcgccaacctggagcgctgggtcaagcgcgagatgcacgtgtggcgggagatcttctaccggctggagaggtgggctgaccgcctggaggccatgggcagcaagtaccaggtgggcagcgagccagcccgccagaccgtctcggtgggcgtggggggtcctgagaactactgccaggacgccgatgcctacgactatacagtcagcccttacgccatcacctcgccgcccgccgctggcgagctgcctgggcaggagccggtggaggcccagcagtacccgccctgggggccaggcgaggacgggcagctgagccccggcgtggacacgcagatcttcgaggaccccagggagttcctcagccacctggaggagtacctgcgacaggtgggcggctccgaggagtactggctgtcacaaattcagaaccacatgaacgggccggccaagaagtggtgggagttcaagcagggctcggtgaagaactgggtggagttcaagaaggagttccttcagtacagcgagggcacgctgtcccgtgaggccatccagcgcgagctggacctgccgcagaagcagggggagccgctggaccagttcctgtggcgcaagcgcgacctgtaccagacgctgtacgtggatgcggatgaggaggagatcatccagtacgtggtgggcaccctgcagcccaagctcaagcgcttcctgcgccacccgctgcccaagaccctcgagcagctcatccagaggggcatggaggtgcaggatggcctggagcaggcggctgagccagccgggccccgcctccccaccgaggacgagggtgaggcagagtccgtcacgccggccctcaccaacgagtccgtagccagtgaccggacccagcccgaatagagggcagtcagggcccccacctgcccaccacaccgcgcctgtggcctttgcaaaccaggactttcgagctgggctgactcctgcagggggggccctcatcctcatccagccgggcccccacctcagcctcccagcctgactcacacaggcacacgtcatccagatgtggacagcaccccccaaacagcaaaggagcccttctcccctgtagggcccctgccccatcaccctccctctgtctgtcttccccacccctgtacctgcctgggctggtgaccctcctccaccgcacccccctccccccagccatgacaggccatctcagcttccttattctgctcaaaacccgggctctctgggtactcagaaaccaaatgtccagatggcacggaccggcaggcaccgacctcaaaaaacaccccagagcaaaagctaaagcagaaccagtgccatgagaacctcggcttcaggggcgctgccctctcctggctgtcaccacatagccggctggcacccttgccgccgcccagggcggcgggccagcctcgggcagtgtggctccctcccccagaggagagctgaagccgaaaacacggcagcggcagccgcagcagcaacagacctgagcaaactcctggtgcctcctggcccctcaggtgagcccccgccagaggg

SEQ ID NO: 36 - DNA, 1203 bp, Gracilinanus agilis
atggagctggagcacctgagcagtgggggcctccatacctaccatggtccccggggcgggccagcggccaagcccaacgtgatcctgcagatcgggaagtgccgggcagaaatgttggagcacgtaaggaaaactcaccggcacctgctcactgaggtgtccaagcaggtggagagggagttgaaaggcttgcacaggtcagtggggaagctggagaataatttggatggctatgtccctaccggtgactcgcagcgatggaagaagtccatcaaggcctgcctgtcccggtgccaggagaccattgcccacctggagcgatgggtgaagagggagatgaatgtgtggcgggaggttttctaccggctggagaagtgggccgaccggctggaatccatgggaggcaagtacccagtgagtggagagcccactcgccagacggtctctgttggtgtggggggccccgaaagctactgccaggaaactgatccctatgactacacagtgagtccctatgccataaccccgcctacaccagcaggagtaactgcgggaggagaggccataagccatgagccctcggacatccagcagtatccaccctggagctcaaccactgaggatgggaccctgagtcctggtgtagacactcagatttttgaggatccccgggagttcctcagccatctagaagaatatttgaaacaggtcggagggactgaagagtactggctgtcccagatccagaaccacatgaatggcccagccaagaagtggtgggaatacaaacagggatctgtgaagaactgggtggaattcaagaaggaattcttgcagtacagcgaggggactctcacccgggatgctattaagagggagctggacctgccccagaaacaaggagagcctctggaccaattcctctggcgtaagagagacctttaccagaccctctatgtggatgctgatgaggaagagatcatccagtatgtggtgggcacccttcagcccaaactcaaacatttcctccgacacccactgcccaagacccttgagcagctgatccagagaggccaggaggtccaagaaggactggagcagggggaggaccccatcgaacagcaaacccagtcggaggacaatgatgaatcactcaccccagctatcgaatcccttgccagtgatgggacccagcccgagtag

SEQ ID NO: 37 - DNA, 1212 bp, Varanus komodoensis
atgcagttggataatatcaaccacgggagcatccactctttccagggccaccgtggcatggccaacaacaagcccaatgtcatccttcagatagggaagtgtagggccgagatgttagaccacgtcaggagaacccaccggcacctcttgactgaggtgtccaagcaggtggagagggagctgaaaggcctccagaaatcggtggggaagctggagaacaacctcgaagaccacgtcccttcggctgctgagaaccagaggtggaagaagtccatcaaggcctgcctgtctagatgccaggagactattgctcacttggagaggtgggtgaagagagagatgaatgtctggaaggaagtgttttttcgcctggagaaatgggctgacagattggagtccggtggggggaaatacagccatggggaatgtgcgaggcaaactgcctctgtgggggtaggaggcccagagatcaggcccagtgagggggagatttacgattatgcgctggacatgagtcagatgtatgccctgacacctcctccactgggggacatgccccatgactcctatcagtggatcactgtcccagaggatgccccaccttctccggtggagacccagatatttgaggatccccgggagttcctgacgcacttggaggactatctgaagcaggtgggtgggactgaggagtactggctctctcagatccaaaaccacatgaatggtcctgccaaaaagtggtgggaatacaagcaggactctgttaagaactggctagagttcaagaaggagttccttcagtatagtgagggcaccctgaccagagatgccatcaagcaggagctggatcttcctcagaaggatggggagcccctggaccagttcctctggcgcaagagggacctgtaccagaccctctatgttgatgccgatgaggaggaagttatccagtatgtcgtagggaccctccagcccaagctcaagcgttttctcagccacccctaccccaaaaccttagaacagctgatccagagaggcaaggaagtagagggcaacttggatcattccgaggagcccagccctcagaggacccctgagcaccagctaggagactcagtggagagcttgcccccttccactactgctagtcctgtggctagcgatgggactcaaccggaaatttctgcacctccagccacagtcatatga

SEQ ID NO: 38 - DNA, 4136 bp, Bufo gargarizans
ctcagatgcaagcagatagaagtcgttttctctcttctcttgcattcacaccgactttcgaggatcattacttgctgaatacttagctttgctttcaacattttatccttttctccagttgttggaagaagtttctcaacattgacgattgggacaaggcatcttctaatcatcaccttcattccagtcatcttggaagatatttggaaatcttcccactgcagaacttctgaaaggactggacactgggtgatatctaattaccatctctcctatatctgttaaacttttcaaaaacattgcattgctttactgaattgagaattttactttcttgtatgttactgacagaattgtagattgtttactgtgttgtatgaaagtgctcttaaccaaacagcatagagagaaaggttgcatgcaagtttgccacctgggaaagccatttcttgccgactgtctcattaacgataacttttttaatattacatttttatatttttgaattgtgaacccgacttttacaattcatatttgataaattatagctaattgtatccaattgtgaccatggcggcaagcatggctcttagtggcatcggagcacccgctctctctgtgcctgaaaaaactgtggctcttcagattggtacttgtagtccagcagaaatgttggacagagtcagaaagacacaggtgtatattctttctggggtctctagacaggttgagaatgagctgaaagggttcaagaggtcagtacagaggttaaattctaacatgcattacgagtcctcagttgttgggattcagaggtggaaacgttccatcaaggcttgtttaatgagatgtcaaggtactttagtcaacttagagaggtggatgaagagggagatgaactcttggaggggtgtgttctcccgttttgaaaaaatggttagcaaagctgatcaaaacttgtgtaggacatgtaagatggaagagaagcacaggtggtctttctatggagaaaaaagtgagaaagaaaaagaggccgatgccaatcaggagattgttgatccttatgcccccagcccaccatcttctccacccccacctccaccaccactgccagcacaatcttgccacccacatcactgggttgtcatctcagttgatatcctttctcctcctgaatttgatgctggaatgtcagaggatcctcgtgagtttatagtgaacttagagaagttctttaagcgtagtgggtggaatgaaaaagtttggctatctcaagtagacaaccacttgaaaggggcagccaagaagtggtgggaatataggcaggagacagtagaaagttggcatgacttcaaagttgccttcttgcaatactgtgaaaggatagttgttagagaagcaatcaagagggacttagatcttcctcaaagacgttgggaacctctagaacaatttgtgtggaagaaaagagccttgtaccatagactttatgttgatgctaatgaggaggacatgatccgttacattattagtacactacacccagagatcaagcgtttcctcaaatccccactccccaagactatggatcagctagtgcaaatggggaaggaaatccagtttgattttgagcagtcagagaagcaaacccttaaggcagcttactcagatgagcaaattagcaccaagttgaatgtcattgtcaccaaggatccttatgatagcaatagcatagtcactgagaaatcaagctacatagaaggatattaagcaggaaacttcagtggttatttgcagagaaattaatgctcttgaatgaaaactttttagactctcaaggtaaaagtcaatttagactcggcacttgagggaaagttgtaggttttctgtaaggtgttgctagaaagtcaaggcaatatctggtataaggtggatttgaaaacgagattttctcctcatagatacaagaaattatgtgagatctaagcaactcaaacgcaaatacagtacacaatgtataggttttctcttgggaacaggacatattgcccttcatgtagctagaacttaagcagtaattgctttctatgaccacatagagtaaatggaaccatggaaaagtttgtgaattgtcaccagaatctggtgtcacaacttttgtgatgcaaataaaaaaagcaaaaaatacaatatcagtaaaaaaaaattcagaagtgacgggtgaaatcatttactctaagtgggggtgtttaactagtgttctgccttctcccctttaaatttcagggggcggcatagataagaaagttcacaatctgttcagttttaagagcattttttaatattgaatgtaaaagagagaaaaaaaaaatcctatttttataccaaaatgtcatccaatgaaatgtgatctatgttgtacataatgtgtacatatgattgaattgtaactttttaccataagtgtttgtattctgtttagaaagcaataatatgcttctacgtctgctaaaaagttcaaaagtttgtcctgaatagcagtgacatctttatttttataacaattctaaaaagttgtatatttttttctttttttttggggggggggggggtagaatgtagtggttgaaattgtaaaatgatacttttggtgtttttgcacatgtaacatatctatggaaatacatagtagcaatttctaatgaacaataatctgttgcatcaaagttgcaccaaaatttttgaatgttatatcttggtgggaccttctcaatcattggacactcaaagacacttgtgcatttctacttgatggacattttcatatattgacatctatctcctgtacgtggaagtgaaaagtttcaatggacaaagtaaaaaaaaaaaaatcatggaccaaacagtcaaccatttctgtacctacaaagtagatacatatgaccatgaatcaacgttcttggctatgccaaccatcgccgttactacggctgccctttcacggaacaagggcagtgtggaatgtaggactttctcagtcaacttcactcaggaatatctgtgaaattctggatttcttgaaatagtcttcaaactttttgaattgtcatgttggacgatagcttaacaaagttgaacaggcatcaagtcccaaaggctggtcaaaggattcacgtctggcaaatattcgaggacttgtgtgttatcaagaaagacatcatcaaatggtactgctcttcctagcatccatgatatcggtcatgaagaatacccaaacgagagccggaagctcctatgtaagtacgagttcaactactggcagattcaatattagtatctaaaaagtatgatatagtaaggattctagtcacaatatgttaattgtaagcccagtgttcagatccctaccttacatggtgctctacagctacagtatctcactgcccattgactactacgtatagcctagcccactatatagttcatagttaaataggtaatgtcagaagtcaatgcactgaaactcaactgtctttatcctttatttcagatgccagacaaaaatcaagccttcagccgtcatctctcagcaagtgaatggcattgttggcaagaccacgctcatcgtctttctcttgtgttctggatcaccagttcagatggaaacagatgccagacttctaagcagtcctatccagaaaagatcttccaacagctccttatggggacttctaagatccagctcaagaaaatctcataaaaccaaacgaaaaatcgtagaaaaaaaaaaaaagagatgatttcacctaaatgacaactttgttcatctaaaataccttcagatcttcattacagacatctaagcctccaggtcaataaggcactgcaatctgataatgaatcaaagtccacaacaacatccatggtacttgacaatgataaaagtgaccttaatttggaagccttatcatagctaaaacaaaaagtcaaaatacaagaaaatgtcaccttttgtaagactttttggtctactatacgtgtatggaacaacagtacatttatccaaagaggtcttgtataacaaaaaactcatgttcatgttcacataactattgagtaataaaatgcaaaagaaa

SEQ ID NO: 39 - DNA, 1563 bp, Neogale vison
atggagctggaccacaggacgagcggcggcctccacgcctaccccgggccgcggggcgggccggcggccaagcccaacgtgatcctgcagatcggtaagtgccgggccgagatgctggagcacgtgcggaggacccaccggcacctgctgaccgaggtgtccaagcaggtggagcgggagctgaaggggctgcaccggtcggtggggaagctggagagcaacctggacggctacgtgcccaccggcgactcgcagcgttggaggaagtccatcaaggcctgcctgtgtcgctgccaggagaccatcgccaacctggagcgctgggtcaagcgggagatgcacgtgtggcgggaggtcttctaccggctggagaagtgggccgaccgcctggagtccatgggcggcaagtacccggtgggcaacgagccggctcgccacactgtctcggtgggcgtcgggggtccagagggctactgccaggaggcagatggctacgactacccggtcagcccctacgccatcacccctccgccggctgctggggagctgccgggacaggagccgggggaggcccagcagtacccgccctgggggagcagtgaggacgggcagccgagccccggcgtggacacgcagatcttcgaggacccgagggagttcctcagccacctggaggagtaccttcgccaggtaggcggctcggaggagtactggctgtcgcagatccagaaccacatgaacgggccggcaaagaagtggtgggagttcaagcagggctccgtgaagaactgggtggagttcaagaaagagttcctgcagtacagcgagggcacgctgtcccgggaggccatccagcgggagctggacctgccgcagaagcagggggagcctctggaccagttcctgtggcgcaagcgggacctgtaccagacgctgtatgtggacgccgaggaggaggagatcatccagtacgtggtgggcaccctgcagcccaagcttaagcgcttcctgcgccacccactgcccaagaccctggagcagctgatccagcgaggccgggaagtgcaggacggcctggagcagggggccgagcccgccagcacccctgtccccaccgaggacgagcccgacgccctcacaccggccctcaccagcgagtccgtggccagtgaccggacccagcccgagtagaggccagcccaggccccggcctgcccaccggaccccacctgtggccttcgccagccaggactgttgagctgggctgacccctgcacggggagcccctcttcctcacccggctgggcacccgacctcagcctgccagcctgactcccacagacacatgccgtccagctgtgggcggcaacccccacgcagcaaagggcccccgccccatcacctgccttctgtctatctttcctggcttccgatgcccccatccactccctgcacactctctggccaccacaggatctcccagcctcgttcttctgctcacccccaccgcccgggccccctgggcactcagaaatcaagtgtgcagatggcccagtccagtga

SEQ ID NO: 40 - DNA, 4559 bp, Dromiciops gliroides
cgtgcagggagcccggctgtataaagccaggaggcagcgggaagggaggcaggctactcagctagaagcttcaccagctttagcggagagcctgggagctgcggcaagcggcggcggcggcggcaagagctgatcttgcaagcgaccagcagcccctatcacctgtggagccgggagactggtacgcaccctcggatctccagagaccacctttctttcctcctcttctcttaatttcctcaagaagccgagaagagaagggggtttgctttggcactgggaggattaaccccttctgaggagccaggctagcggagagaaaggctgctgaactcggacccctgcggtgggcccgggaggaatttgccttgtctgtttcccaagaacacaagcgatggagctggagcacatgagcagtgggggccttcatacctaccacggtccccggggtgggccagcggccaagcccaacgtgattctgcagatcgggaagtgccgggcagagatgctggagcacgtaaggaagactcaccggcatctgctcaccgaggtatccaagcaggtggagagggagctgaaaggcttgcacaggtccgtggggaagctggagaataatttggatggctatgtccccaccggggactcacagcgctggaagaagtccatcaaggcctgcctgtcccgctgccaggagaccattgcccacctggagcgatgggtgaagagggagatgaacgtgtggcgagaggttttctaccggctggagaaatgggctgaccggcttgagtccatgggaggcaagtacccagtgagcggggaggccgcccgccagactgtctctgtgggcgtggggggccctgagagctactgtcaggagactgacccctatgactacacggtgagcccctatgccatcacgcccccaacaccagcaggggtcatcgggggaggagaggccttaagccacgagccctcagagaaccagcagtacccaccctggagctcgaccactgaggatgggacactgagtcccggtgtagacacacagatttttgaggatccccgtgagttcctcagtcacctggaggaatatctgaagcaggtcggtgggactgaagagtactggctgtcccagatccagaaccacatgaatggcccagcaaagaagtggtgggaatacaaacagggctctgtgaagaactgggtggaattcaagaaggaattcttgcagtatagcgaggggaccctcacccgggatgctatcaagcgagagctggacttgccccagaaacaaggggagcctctggaccaattcctctggcgtaagagagacctttatcagaccctgtatgtggatgctgatgaagaagagatcatccagtatgtggtgggcacccttcagcccaaactcaagcatttccttcgacaccctctgcccaagacccttgagcagctgatccagagaggtcaggaggtccaagaagggctggagcagggagaggatgccaccgaacagcaaacccaatcagaggacaatgatgaatcactcaccccagctattgagtcccttgccagtgatgggacccagcctgagtagaggtggtggcagccacccctcagcctttgttagccccctcttacccccaccccttctgggtgttcccttctgggatcacttggttgaggattctcccagatgtcctaatttcccaggggcagcttgtgctgtcttgccaaggaagagttggcagtcagccccatcccccagtgggattggcacttggtggacttggacactttgggagacaagactcatgcagtaggggttttcccatcaccttgcccatactccctccctcctacttgaatcctccatagtttcacacaggatcacctatgccagcatcagctaactttccccccctcctcagctgcttgaagaccggaattttagccttcctctttccctctagccagtatggtgggtttccttatcttatttttgtccatcactccctttcactcctccccatccccatggctctacaaagagtttcacctgctcccacatgaaactctttctaaccaagaatccagccactggtcccctaacctcattcctggccactagccacaggggacatagagagtagctaaattataaggtaggctggcattgagccagctcactgttcagaccctggactccaagatcatcagagaagaaacacagaaaaagaaaacctgctttccaacctcttacccttcgtgtggtgagaatcaggggtccacagccattctgagcccaccatggcagcgggtatcctcctggctcccccagagaagacacaaagtctttccagggatggcagcagcaatgggtgcttggagatctcgatccctcctgcagtctaaaggtgagagtctcccctgtgtaaggaatcaaagaattctagaatgtcagggctgggagaggaaaccttagagagaattttagaaatgagccaactgaatgactcaacaagttacccaacaagttagtggttgaatgcagctctcctgactccctgttaaggctttttttggtgtagggaatcctcttagggaattacatccagtcagtaagggtctgttccttagcatcttgagtggtttcccatttcctacacataagtgagaagagaggcagcatgaaagggggattaggggtccagataggagaaaggctgaccccagagaggtgcctaataccaacattagtcccctgagaaagcccaaggagagatggcaagtgcaacccagaacttgaagaatgtctctcttctccatctctatcttaatagctcacatgcattgctttttttttttttcccctcacccttgctacagtgattcactccagcctagcagaacagagaggcagtgatgattcaccttgtgatgggcagcaggctgagggggatcaaggaagctccagtgcctgatttccaaagtccttggggattcagtgtctgcacctaaaaggtaagtaattactatttttttcttttgaagacatccctatccactcctttccaatgggtcctaattgaagaggcagccccctactcccccatccttaaattctttcacccaggcctagatggtggagcatagtgtattgatatgcaaatgaaccccaggaatccaagggatggggcaattttggtttgaattctgtggtctggacagttctgaaggggaaaattaccccctccccttgcaaatctgatattggaaatggaaggccctaccaatttccctttctgggaagatagggacaagagtggaggttagtctgaaaggtctaggcctcggagcctttctcaagacagtcatttgtggtcaagtgtctggtcacccttgatggagccaagaatcaccctccttcatggccagtgtagctcccccatctaccccctcactcatgcttttcttttcaaaccccaattcctattgcccctttctactgtctctaactcacctgttatactgatatttctttcagaaccaagactctcacaaacttatttgctgctgaggctgaaataggctcaccatcctggaggggagagaacaaacctgccataaggggaaggagaagcttgtggatacagcagtggagctgcccagacaaggagaaggagatggaagggaaaggaagggattgccaaagaacaggggcagacagagctctggacagaagtgacactggccaaactgacaactcacagggaggatggatggaaaagcagcctcctgcaggaagccaatgtctggcccttaggcactacctggcttcctgccacttctctgcatctttggagtcccaagttcatgtggcaggatctgtaatatgatcccctttatctccttcaaccagggccccatgtcctgtcctgtgtcagtggccatggcccaccttcctgccccaccctcctgaacctcactcctggaggtgtctcccaggggcagaggaagtcaggatttctttcctattggattccccactgtcatgtccccaccctcccaatcctccccacactggctaacaaatgtttacagccctgtcccatctttggagagtccatccagggttagttcagccttcctggaccttactgcctacctttccaagggagtaggaggcagggtgtatctgacagtcccctagattctggctgatttgccagccatagtcctgtgctctgccaacttctccctatagatttattttttattagactttcttcagattaatatatagactatattaaccctgtactaattgtatctggtcccattggccagaacttgcttggcctcattgaccattgatggggggggacccctctgggtagctctaagttggatgagctatactccccaccccttcccctatttatccattagactggccacagcatcaactgactaagtccatggtcaacaggcaatgtgtgcttcccttcccctgaaaaaaatattcttttgtaagatttctttaataaaacattgaa

SEQ ID NO: 41 - DNA, 3251 bp, Cervus elaphus
tccgcgcagccggcccccagcagcccctcgccgtccccaagaggactttgcagcctccctctctcggctgtccgagcgagccccgccgcaacccgcgagccgatggagttggaccacaggacgaccggcggcctccacgcctaccccgcgccccgcggcgggccggccgccaagcccaacgtgatcctgcagatcggtaagtgccgggcggagatgctcgagcacgtgcggaggacccaccggcacctgctcaccgaggtgtccaagcaagtggagcgggagctgaaggggctgcaccggtccgtgggcaagctggagagcaacctggacgggtacgtgcccaccggcgactcgcagcgctggaagaagtccatcaaggcctgcctgagccgctgccaggagaccatcgccaacctggagcgctgggtcaagcgggagatgcacgtgtggcgggaggtcttctaccggctggagaggtgggccgaccgcctggagtccgcgggcggcaagtacccggtgggcagcgacccagcgcgccacaccgtctccgtgggcgtagggggtcccgagagctactgccaggaggcggacaactacgactacactgtcagcccctatgccatcactcccccgccggccgccggccagctgccggggcaggaggaagtggaagcccagcagtacccgccctgggcgccgggggaggacgggcagctgagccccggcgtggacacgcaggtcttcgaggacccgcgggagttcctccgccacctggaggactatctgcgccaggtgggcggctccgaggagtactggctgtctcagatccagaaccacatgaacgggccggccaagaagtggtgggagtacaagcagggctccgtgaagaactgggtggagttcaagaaggagttcctgcagtacagtgaaggcacgctgtcccgggaggctatccagagggagctggacctgccgcagaagcagggcgagccgctggaccagttcctgtggcgcaaacgggacctgtaccagacgctgtacgtggacgccgaggaggaggagatcatccagtacgtggtgggcacgctgcagcccaagctcaagcgcttcctgcggcccccactgcccaagaccctggagcagctcatccagaagggcatggaggtgcaggatggcctggagcaggcagccgagcccgccgcggaggaggccgaggccctcacgcctgccctcaccaacgagtctgtagccagcgaccggactcagcccgagtagagggtgccggccccgcctgcccgcctgtggccctcacccaccgggacttttgagtgggcccgcccctgcaggggagcccttagtctcctcctgcagccggacgctcacctcggcctcctagcctgactccaacagacacgcgtgacccagatgcgggcagtgtcccccagacagccaaggggcgccccttcctcgcagacccagccctcaccctccctgcgtctgtcttccccgctggtggactggcctgagtcagcaaccccgccctccatcctctcaggccataacagtttccttatcctgctcaatgcctgggccctctgggcactcagaaacccagtgtccaaatggcacgggccggcgcgcacccagctcaaggaacaccccagagcagaagctcaggggccgctggtgcccccgcagcctgggcttcagggaagctacttctcccggcagtcgccgtgaccggctggcacccctgccgcccccccccggggcagctggccagcctcgggcaatgtggctccctccccctggaggagagcccaagctcaagacgcagcagcagcagcagtagccgcaatggcagcaacagacctggcgactcggtgcctcctggccactcaggtgagcccctgccccttggcaccaccgccagggggcaccatagggctgggagggcccagggccaagcccaccctgccaggcgagctggaggttcagagaccctggcgttcccaaaaatcagctgctgggatggggttggggtggtgtcgaggggagatcccaggggtcagggagggggctggagtgggggcagggctggcggaggttgctgacccagctctcactgggccctgtgttttctctccccgcagcaccagtggagagggacagagccccgcaatgactcacccacagcaggcggcaggtcccctggggcctgagtcctccagcccggctgaggcagcagccggccctcagagccaggagagttgacgacaggtacacaggggaccccgcccccggctgtcctcaccaggggccccccagctccccccagcccctggccccaggcccccagtcttctgggccagctgagaaacagccccccgggaccccaggggcttgctctctgaaagggcggccccgccccgccctggcagcccgagtccctgacacccgtgtcttccttcctttcaggtctccaggctcccacagagcctttgctgctgtgcccggcactgtcccttctcctctctccctgcaagctgcctgcacgagaggagaaacctgagaccagaggagggggcccagcagagagctggtggtgaagaggggccagcgcgagggccagggcctgccactatgcccgccccgctggctgcccactgcccgcccgcccccagggccgctgccttcccgggcctggcctggctcccaccccggagcccctgcccgctgcgcggccaccctctgccgttagagcttccgccacggccgcccctcccggcggccccaggcccagccccaggaggcccggaagcctgtgcccctggggctcactcaggctccctgccaggccctgccttggccctggcctggacccccactgccccagccaccaactccctggtgctggccggccacctgtgtctgcagcccaagcaggcctggttgggggctcccagactcgggagaccagctcccgcaggaaactctgcctacccctccatcccgtgtcctgccagcgccgccccccgccccagattttatttttgcacataagccataacctgccctcctcggctggcgcaggctacggggaggccccaaggtcctcagggggggtgtggtcaagtccctgccccctgtggatcaagcctcgaatgtcaggccaggtcatgtccaccctgccacctcacctgaagacagacgctttttctaagactttgttaataaaacactgaaactta

SEQ ID NO: 42 - DNA, 3413 bp, Prionailurus bengalensis
ggccgctctccgccgctctccctgcgctgcccgcgctccccgccgctctccctgcgctccgccgcgcccgcgccgaggacaccgaggacccggctccaccgcgccgccggcccaggggcacttcgcagcccgccgcctcccgcccgtccgagcgccgcggccacctgctcactccctccgatggagctggaccacatgacgagcggcggcctccacgcctaccccgggccgcggggcgggccggccgccaagcccaacgtgatcctgcagatcggtaagtgccgggccgagatgctggagcacgtgcggaggacccaccggcacctgctgaccgaggtgtccaagcaggtggagcgggagctgaaggggctgcacaggtcggtgggtaagctggagagcaacctggacggctacgtgcccaccggcgactcgcagcgctggaagaagtccatcaaggcctgcctgtgccgctgccaggagaccatcgccaacctggagcgctgggtcaagcgcgagatgcacgtgtggcgggaggtcttctaccggctggagaggtgggccgaccgcctggagtccatgggcggcaagtaccccgtgggcggcgagccggcccgccacaccgtgtccgtgggcgtcgggggtcccgagagctactgccacgacgccgatgggtacgactacacggtcagcccctacgccatcaccccgccccccgccgccggcgagctgcccgggcaggagcccgccgaggcccagcagtacccgccctgggcgcccggcgaggacgggcagcccgggcccggcgtggacacgcagatcttcgaggacccgagggagttcctcagccacctggaggagtacctgcggcaggtgggcggctccgaggagtactggctgtcccaaatccagaaccacatgaacgggccggccaagaagtggtgggagttcaagcagggctcggtgaagaactgggtggagttcaagaaggaattcctgcagtacagcgagggcacgctgtcccgcgaggccatccagcgcgagctggacctgccccagaagcagggggagccgctggaccagttcctgtggcgcaagcgggacctgtaccagacgctgtacgtggacgccgaggaggaggagatcatccagtacgtggtgggcaccctgcagcccaagctgaagcgcttcctgcggcacccgctgcccaagaccctggagcagctcatccagaggggcaaggaggtgcaggatggcctggaccaggcctccgagcccgccggcccccagctgcccgccgaggaggaggccgaggccctcacgccggccctcaccagcgagtctgtggccagcgaccggacccagcccgaatagagggcggcccaggccgcagcccgcccgccaccccccgcccatggcctttgccaaccaggactgtccgagccgggccgagccccgtgcgggggagccctcgtcccccgcccgctgggcaccccacctccgcctcccggccggactcgcacaaacacgcgtcatccagacgtggacactctcccccacccccccagcaacaaaggagccccccccccccaccgtcctgcggggcccctgcctcgtcacctgcctttctcctgtctgtctttcccggcccccatctgcaccctgcacactctcaggccatgacccgacttccaggctcccttattccgccccccgcctgggccctccgggcattcagaggtcaagtgtccgggcggcacaggccagtgcgcaccaagctcgagggacaccccggaacagacgcgaagacagaccggtgccgccggaaccctggcttcggcgcgctgccttctcctggcagtcgctgcgcggccggctggcactctcgtcgccgcctcgggcagctggccagcctcgggccacgaggcccctcctcctggaggacagctgaagcgtaagacgcagcagcagcagcagcagacctggcgtcctggtgcctcctggcccctcaggtgagcccctgccccacggcaccaccccggggggggggggcgctgtagagtagggaggacccagggcccgtccattttccgggtgagcccactgaggctcagaggcatccccagcgcgttagctgcaggggtggggtgttggggggctgcagcgcagagcggtggggaaagagcagagaccccagggatcggggaggagggctgggggagtgctgagccagctctcacacgacccgacccggtgctttctcctcagcatccgtgattcacaccagcctggaaaaggatcggctgggctcgatgactcacccacggcgggcggagggtcccacagggcccgagtcctcacactccgctgaggagccgggagactgacgacaggtaaggggccccatctctcccaccgagaccctgtccctcagctgtccttcctggggccccaggcccggcggcccccagcggcgctctgggcaagccgggggccgccccgtaacgtccacccacacccttcctgcggagctcctcccggcctctggcctgtccctgacccccccgtgtcgttctttcaggtcccaaggctcccacagagtctttgctgcttgcctggcacttcccctccctctcctcccgcaagctgcctgcacacgaggagacgtcgaggtcggcgagaggggctgcagagaggacaggcccggcggagagctggaggtgaagacgggccagcgtgagggccagggcctgccgccaggcctgccccgctggccaccagccctcccgcccccaggtccgctgcggctggagtcggggtctgccaccttgggccctgcctcgctccagcccagggacccccggccacggcacggcggccgtcctctcctaccagagctttccgggagctctgacgccgaggccacggcccctgctcccgcccgcagccccagcagtgcccagaagcctttgcccctggggcttaagcgggctctctgccaggccccgccattgccagggtccggacccccacctctccaaacaccagcaccccggtgcagactggccactcaggtctgtagccccagcaggccctggctggggggtcctcctttccacctgtccagtggggattcccaggttcagaagactggtgtctgcagaagattctgtcaaccccgacatcatgcacccctgccagcacccccagattttatttttgcacataagccataacccacactcacaagctggcacgggctgcagggaggccccagggtcctcaagagggtgtggccagccctccctgtccccagcggatcaggccttgatgtcaggccaagctgtgtgcagccccctgtcaccttccctgaagacagactttttaagtttttgttaataaaacactgaaacttc

SEQ ID NO: 43 - DNA, 3252 bp, Cervus canadensis
tccgcgcagccggcccccagcagcccctcgccgtccccaagaggactttgcagcctccctctctcggctgtccgagcaagccccgccgcaacccgcgagccgatggagttggaccacaggacgaccggcggcctccacgcctaccccgcgccccgcggcgggccggccgccaagcccaacgtgatcctgcagatcggtaagtgccgggcggagatgctcgagcacgtgcggaggacccaccggcacctgctcaccgaggtgtccaagcaagtggagcgggagctgaaggggctgcaccggtccgtgggcaagctggagagcaacctggacgggtacgtgcccaccggcgactcgcagcgctggaagaagtccatcaaggcctgcctgagccgctgccaggagaccatcgccaacctggagcgctgggtcaagcgggagatgcacgtgtggcgggaggtcttctaccggctggagaggtgggccgaccgcctggagtccgcgggcggcaagtacccggtgggcagcgacccagcgcgccacaccgtctccgtgggcgtagggggtcccgagagctactgccaggaggcggacaactacgactacactgtcagcccctatgccatcactcccccgccggccgccggccagctgccggggcaggaggaagtggaagcccagcagtacccgccctgggcgccgggggaggacgggcagctgagccccggcgtggacacgcaggtcttcgaggacccgcgggagttcctccgccacctggaggactatctgcgccaggtgggcggctccgaggagtactggctgtctcagatccagaaccacatgaacgggccggccaagaagtggtgggagtacaagcagggctccgtgaagaactgggtggagttcaagaaggagttcctgcagtacagtgaaggcacgctgtcccgggaggctatccagagggagctggacctgccgcagaagcagggcgagccgctggaccagttcctgtggcgcaaacgggacctgtaccagacgctgtacgtggacgccgaggaggaggagatcatccagtacgtggtgggcacgctgcagcccaagctcaagcgcttcctgcggcccccactgcccaagaccctggagcagctcatccagaagggcatggaggtgcaggatggcctggagcaggcagccgagcccgccgcggaggaggccgaggccctcacgcctgccctcaccaacgagtctgtagccagcgaccggactcagcccgagtagagggtgccggccccgcctgcccgcctgtggccctcacccaccgggacttttgagtgggcccgcccctgcaggggagcccttagtctcctcctgcagccggacgctcacctcggcctcctagcctgactccaacagacacacgtgacccagatgcgggcagtgtcccccagacagccaaggggcgccccttcctcgcagacccagccctcaccctccctgcgtctgtcttccccgctggtggactggcctgagtcagcaaccccgccctccatcctctcaggccataacagtttccttatcctgctcaatgcctgggccctctgggcactcagaaacccagtgtccaaatggcacgggccggcgcgcacccagctcaaggaacaccccagagcagaagctcaggggccgctggtgcccccgcagcctgggcttcagggaagctacttctcccggcagtcgccgtgaccggctggcacccctgccgccccccccccggggcagctggccagcctcgggcaatgtggctccctccccctggaggagagcccaagctcaagacgcagcagcagcagcagtagccgcaatggcagcaacagacctggcgactcggtgcctcctggccactcaggtgagcccctgccccttggcaccaccgccagggggcaccatagggctgggagggcccagggccaagcccaccctgccaggcgagctggaggttcagagcccctggcgttcccaaaaatcagctgctgggatggggttggggtggtgtggaggggagatcccaggggtcagggagggggctggagtgggggcagggctggcggaggttgctgacccagctctcactgggccctgtgttttctctccccgcagcaccagtggagagggacagagccccgcaatgactcacccacagcaggcggcaggtcccctggggcctgactcctccagcccggctgaggcagcagccggccctcagagccaggagagttgacgacaggtacacaggggaccccgcccccggctgtcctcaccaggggccccccagctccccccagcccctggccccaggcccccagtcttctgggccagctgagaaacagccccccgggaccccaggggcttgctctctgaaagggcggccccgccccgccctggcagcccgagtccctgacacccgtgtcttccttcctttcaggtctccaggctcccacagagcctttgctgctgtgcccggcactgtcccttctcctctctccctgcaagctgcctgcacgagaggagaaacctgagaccagaggagggggcccagcagagagctggtggtgaagaggggccagcgcgagggccagggcctgccactatgcccgccccgctggctgcccactgcccgcccgcccccagggccgctgccttcccgggcctggcctggctcccaccccggagcccctgcccgctgcgcggccaccctctgccgttagagcttccgccacggccgcccctcccggcggccccaggcccagccccaggaggcccggaagcctgtgcccctggggctcactcaggctccctgccaggccctgccttggccctggcctggacccccactgccccagccaccaactccctggtgctggccggccacctgtgtctgcagcccaagcaggcctggttgggggctcccagactcgggagaccagctcccgcaggaaactctgcctacccctccatcccgtgtcctgccagcgccgccccccgccccagattttatttttgcacataagccataacctgccctcctcggctggcgcaggctacggggaggccccaaggtcctcagggggggtgtggtcaagtccctgccccctgtggatcaagcctcgaatgtcaggccaggtcatgtccaccctgccacctcacctgaagacagacgctttttctaagactttgttaataaaacactgaaactta

SEQ ID NO: 44 - DNA, 1478 bp, Panthera tigris
aggacgccgaggacccggctccaccgcgccgccggcccaggggcacttcgcagcccgccgcctcccgcccgtccgagcgccgcggccacctgctcactccctccgatggagctggaccacatgacgagcggcggcctccacgcctaccccgggccgcggggcgggccggccgccaagcccaacgtgatcctgcagatcggtaagtgccgggccgagatgctggagcacgtgcggaggacccaccggcacctgctgaccgaggtgtccaagcaggtggagcgggagctgaaggggctgcacaggtcggtgggcaagctggagagcaacctggacggctacgtgcccaccggcgactcgcagcgctggaagaagtccatcaaggcctgcctgtgccgctgccaggagaccatcgccaacctggagcgctgggtcaagcgcgagatgcacgtgtggcgggaggtcttctaccggctggagaggtgggccgaccgcctggagtccatgggcggcaagtaccccgtgggcggcgagccggcccgccgcaccgtgtccgtgggcgtcgggggtcccgagacctactgccacgacgcggatgggtacgactacacggtcagcccctacgccatcaccccgccccccgccgccggcgagctgcccgggcaggagcccgccgaggcccagcagtacccgccctgggcgcccggcgaggacgggcagcccggccccggcgtggacacgcagatcttcgaggacccgagggagttcctcagccacctggaggagtacctgcggcaggtgggcggctccgaggagtactggctgtcccaaatccagaaccacatgaacgggccggccaagaagtggtgggagttcaagcagggctctgtgaagaactgggtggagttcaagaaggaattcctgcagtacagcgagggcacgctgtcccgcgaggccatccagcgcgagctggacctgccgcagaaacagggcgagccgctggaccagttcctgtggcgcaagcgggacctgtaccagacgctgtacgtggacgccgacgaggaggagatcatccagtacgtggtgggcaccctgcagcccaagctgaagcgcttcctgcggcacccgctgcccaagaccctggagcagctcatccagaggggcaaggaggtgcaggatggcctggagcaggcctccgagcccgccggcccccagcggcccgccgaggaggaggccgaggccctcacgccggccctcaccagcgagtctgtggccagcgaccggacccagcccgaatagagggccgcccaggccgcagccggcccgccacccccccgcccgtggcctttgccgaccaggactgtccgagccgggccgagccccgtgcgggggagccctcgtccccccgcccgctggccaccccacctccgcctcccggccggactcgcacaaacacgcgtcatccagacgtggacactctc

SEQ ID NO: 45 - DNA, 1478 bp, Panthera leo
aggacgccgaggacccggctccaccgcgccgccggcccaggggcacttcgcagcccgccgcctcccgcccgtccgagcgccgcggccacctgctcactccctccgatggagctggaccacatgacgagcggcggcctccacgcctaccccgggccgcggggcgggccggccgccaagcccaacgtgatcctgcagatcggtaagtgccgggccgagatgctggagcacgtgcggaggacccaccggcacctgctgaccgaggtgtccaagcaggtggagcgggagctgaaggggctgcacaggtcggtgggcaagctggagagcaacctggacggctacgtgcccaccggcgactcgcagcgctggaagaagtccatcaaggcctgcctgtgccgctgccaggagaccatcgccaacctggagcgctgggtcaagcgcgagatgcacgtgtggcgggaggtcttctaccggctggagaggtgggccgaccgcctggagtccatgggcggcaagtaccccgtgggcggcgagccggcccgccgcaccgtgtccgtgggcgtcgggggtcccgagacctactgccacgacgcggatgggtacgactacacggtcagcccctacgccatcaccccgccccccgccgccggcgagctgcccgggcaggagcccgccgaggcccagcagtacccgccctgggcgcccggcgaggacgggcagcccggccccggcgtggacacgcagatcttcgaggacccgagggagttcctcagccacctggaggagtacctgcggcaggtgggcggctccgaggagtactggctgtcccaaatccagaaccacatgaacgggccggccaagaagtggtgggagttcaagcagggctccgtgaagaactgggtggagttcaagaaggaattcctgcagtacagcgagggcacgctgtcccgcgaggccatccagcgcgagctggacctgccgcagaaacagggcgagccgctggaccagttcctgtggcgcaagcgggacctgtaccagacgctgtacgtggacgccgacgaggaggagatcatccagtacgtggtgggcaccctgcagcccaagctgaagcgcttcctgcggcacccgctgcccaagaccctggagcagctcatccagaggggcaaggaggtgcaggatggcctggagcaggcctccgagcccgccggcccccagcggcccgccgaggaggaggccgaggccctcacgccggccctcaccagcgagtctgtggccagcgaccggacccagcccgaatagagggcggcccaggccgcagccggcccgccacccccccgcccgtggcctttgccgaccaggactgtccgagccgggccgagccccgtgcgggggaaccctcgtccccccgcccgctggccaccccacctctgcctcccggccggactcgcacaaacacgcgtcatccagacgtggacactctc

SEQ ID NO: 46 - DNA, 6166 bp, Lagopus leucura
gcagagctctgtgcatctataccgaaagcaattttgtctcgacaagtttaccggagaagaaatcatcaggatttttttttttttttttttttgcagcactaacagcttccagcttctgtgagcatcgctgtgtttcaacgagcggggactgcatgctgtttgagattctcagctacggacaagcaggtagagggcacgcgtttggggtcagacgtcttagccaactcctctccttgtgctcctgaaggatcctcgctctctttgggacactctgagcacgtgagaccggcgtttccaggaggagaaatttgcctccaactctctctgcgatccacggggactgaacagctcgctctgcggtgatatctgatttggttgtgtttgtgtctaaaagtcctttgaggggggtttagaagtctctgtgtgttgcttgggaagtgctgtgttgaggtttttaggagcaggctctagggccaaggcttataacccagttctgtctgtgtcccgtactcatacagtaggagccatgcagctggacaatgtcaccaatgcaggcatccactccttccaggggcaccgtggagtggccaacaaacccaatgtgatcctacagatagggaaatgcagggcagaaatgttggagcatgtcaggaggacccaccggcacctcctgtctgaagtctccaagcaggtggagcgtgagctgaaaggtttgcagaaatcagtggggaagttagagaataacttagaggaccacgtgccaaccgataatcagagatggaagaagtccatcaaggcctgcctggctaggtgtcaggagaccattgctcatctggagaggtgggtcaagagagaaatgaatgtttggaaggaggtctttttccgtctggagaagtgggcagaccgtctggagtccatgggaggcaaatattgtcctggggagcatggcaaacagaccatgtctgttggggtgggaggcccggagataaggccaagtgaaggtgagatatatgattatgcccttgatatgagccaaatgtatgcactgacccctgctcctggggaggtgcccagcatcccccagggccatgattcctaccagtgggtctctgtgtcagaggatgctccagcatccccggtggagactcagatctttgaggatccccatgagtttctgagccacttggaggagtacttaaagcaggtgggtgggacagaggagtactggctgtctcagatccaaaaccatatgaacggtccagctaaaaagtggtgggagtacaagcaggactctgtcaagaactgggttgagttcaagaaagagttcctgcagtacagcgaggggactctgacaagggatgctatcaagagggagctggatctaccccaaaaagagggagaacccctggaccagttcctctggcgcaagagagacctgtaccagaccctctatgttgatgcagatgaggaggagattattcagtatgtggtaggaaccctccagcccaaactgaagcgcttcttgagctatcccttgcccaagaccttagagcagctgattcaaagagggaaggaagtccaaggcagcatggaccactcagaagagcccagccctcaaaggacccccgagattcagtctggggactctgtagagagcatgcctccctccaccactgccagtcccgtgccaagcaatgggacacaacccgagccccctagcccaccagctactgtcatatgagctagctggatggagacagcaatctgggttacataagagggagaaaagggcatatttaggaagcttctgctcaaagagaggttctggctgagacatgacatgaggtgtgctcagcccaacagcccatagcaaaggaattaactttgcttgtggggggagggtggtgaagggggagaggcaccttagaatgtggttgcccacttcacatgagccacacaatccagtggtgctggagatgctacttgcaccactgcagggaatggactattttataagacccatgacaagaaactagagacaattccccaaattcagaagcaattacttggcactggtggctttcaaggacttcagatgagcgcagctattggctgagggttcctacccatctggatcccttctccttctcccctccctcttctgaagaggtgtccttcttctgagaggacatccttcttttgacccttgtccatttctattttaccaccgggcttctgtttacttgacagtctcctattctatcttgatctaaagaactaattttttttattattatttatttaagaagaaatgctatgacttcatgaaaagaaaactttatgaatttggataattttcagtggttttaattctactgtgcctaacacctgctttaatgcttttgcacccaagaggacagtttactccttatcttagtttctgttcactcaaatcaaggtcactgcagtgcagaagcaaatttcaccctttctctgcacattatgctgtgcattcagcagtaaatagagtttcagattaaattctgagttcatttattgaaacgagaatgtatctcccttcagagaagggagagtgtcaaggtggagagagaaaacactagagagattttagcagatggggggggaggggtttaagggaaataaatccttatattttgaatgaaacaaacaaacacatcctaaatccagagcaaaatattcccagagcagcaaatcatgtccatgctgatgagtggagacaacactcctggagacaggaacttctgccatataaaagcaaagctaagtgaaaagaggagctgtatgtcccagcacaggctcaacctgtgcatcgtaaagaagaacttgtgctttagcagacagactcaaaacactcttggaaagtctggcatctctgtcctggagcacctgagaacaaagcattgtctgctcacacagaactaccacaggagtgtgccatggatggaggcaggcttggacttggtgacattttccatgttgagagagcaatgctcagtcttcacctcgctttgaccaatgcctgatgatgggagttagagatgaaattgctatgagaattatgaaatttggctctttgaagcttctcaaggttggacacatcttgagcatcatctgcattcatcaccagaccaaataagaaacatctctgcaaggagatacagcagtgatgcagcaacaagactgcccctgggatgttcctggcactgcaacagtagcaatagtggcttggaagacctttggcttactttcttcctagaggctgaaggtaggacaactttctgacattgttctgtctgcactgcttagacctaagttagcctgtccagtgggagccttacactggaatatatgggatgtagagtgctgtaaatggcaaggtagagcttggaggaaaagaaaggagggacaaccaaagggaaataaaggacagtgaaaagaaaaggtttccatacacaataatcttacacattcctattaatgtggggaaggagtgggaatgatctgccccatgaagttctgggcttgagtgcccagctgtgacaacacatcacaggtccataacatagcccaaagttaatgcatatctgttctgcacatctgcctagatgtaagtttttgttaggagaagcgagggctctcctcttacttgttattagtgaatgtgaattagtctgcagtggctgtgtctgtagagagaaatgagcagttcttactaatgacctggaatgggtggtggaggagtgggtgtcactgctgaggatgagctggccatgcattacaagcattatcttctcttgattacagtgactcactcagattctcctctgagaaaaaaatcacaatgctcaagactcagaaggaaagccaaagggaaaagacttcaaaaccagtggttcaacatgggacctgctgccaggatccccagccacccagtgccagatccactgtctgaatgaaagcctggtacaggtaattacctctccttttatccttatgggcctttcttaacctcttcatatccctactcaagatattgaatagcccacgtgcaaatatctgcgctggtcttgggacctcagaactaagtctgagacctcagccacaagggtctatctcaaccagatagtgggatttcagctgcttaatttaggaacacaagcatcagtctcagtgattaatgccctgggagtggtatatgccctgccttactttctgctggaccactgcaaacgcttaaactaaaatgcctaatgggacttccagcccttgagcacctggtgggcacagctaattataaacctgtctcctgagaaatcccttgtactcaccactttggaaatctaacctgagctgtgtcatcttttttcttttagagattcctgctgcgcctgttactgagtttccttctctgtgcccaagagtcatgtcttcccaggtgataagcaagcactgctagaagacagggcaaagtgagcaccaaagagcctttcatgcagtgcagtgccatactcaagatgctgagagccttgagtgagtgaaaggtggagccacttccaacaggatgaagaagaggctgagctggtccagctagtccaagtgaagaagagagtgttaagaaagagaaaccaggaggcagaacaaaagagccaaatctgggctttgaggacagcaaggatgctgggcttgtagtgactgtctgttgatatgataccatacctctgccatctgcggccactgagaaatcttcactggattatcagttagaaaaaaactttcctgattaactttgctaaatgaatgaccctacaaaggctacgaaccctccatgctctcaaggctgtaactcatttttcctgagttgagggtcgcttcatttcatgcgggtatcagttttcaaacctcaaacagctctgggggtttggagaagcatcctgaggttcagatgcttgtctgaactgcttgagtttgcacaacaggaccagctgtcttgccaaaagggacgctcttgtgagacagcaggtacttcctggatctgcatgggccagagttactgcaagaaccagggttcttgagttggctttggtgtggctgcttccatccagacccagggagtgcaaaaagtgcatgaaagacagtatgtgaattgaaccaagcctttttgcaagacagttttggttcacatctcatttgaaaggatccagttggttcctctctcttccagagccaactgtcctgggtatgtgtgtgtgcgtgtcagtgtgagtgtgtgtgttttgagccaacaaatctacttaaccaaattttgagttgttctgttgtgtttaaactaagccaatggaacttaatgtgcatttcaacattgctcaacagaaatgtccaggactagaaaattatttgaaaacatgtaaaattcaagttggtaggcatcatcccaaggtcaatatgaagtttgattttgaggtgcttaatttctacagtccttctcaaggaatctaactgcctcaataagcattttctatatctatagactttccagtgaattagcctgcctgtgctacttgatttggtcctgagctttatacattttgaactgactttgtgaaatgtgcacaagtaaatatccttggctgattttatttcagttattgctcctagctgactggagctttacttgtagcaccctggtttatattaccagtttctccaggaaggactggtagtttgttttgctggggcaaagtcatgtgaatgaagaagtgtgtatgtgttgtgcctgtgaaactttagcgaatttcaattactggatttttgttccttaggcaattttacatttgattctgacacaactaccttagagtttttatttttactagaaatattattaattcaaacaaccttgtacaaaaggcaaacgcactgcaggttataggggttgaagccaaaggtctttgtaagctgacatcacttgccctagatctgactgtatcagacagcatattcctcacatgttatgttggagttacaagatcacaccaagccactagaacctgtgaatagaatagtgctacactttatttgctattgtagcaaagccttttatagatttatacaataaaactttgaa

SEQ ID NO: 47 - DNA, 1215 bp, Centrocercus urophasianus
atgcagctggacaatgtcaccaatgcgggcatccactccttccaggggcaccgtggagtggccaacaaacccaatgtgatcctacagatagggaaatgcagggcagaaatgttggagcatgtcaggaggacccaccggcacctcctgtccgaagtctccaagcaggtagagcgtgagctgaaaggtttgcagaaatcagtggggaagttagagaataacttagaggaccacgtgccaaccgataatcagagatggaagaagtccatcaaggcctgcctggctaggtgtcaggagaccattgctcatctggagaggtgggtcaagagagaaatgaatgtttggaaggaggtctttttccgtctggagaagtgggcggaccgtctggagtccatgggaggcaaatattgtcctggggagcatggcaaacagaccatgtctgttggggtgggaggcccggagataaggccaagtgaaggtgagatatatgattatgcccttgatatgagccaaatgtatgcactgacccctgctcctggggaggtgcccagcatcccccagggccatgattcctaccagtgggtctctgtgtcagaggatgctccagcatccccggtggagactcagatctttgaggatccccatgagtttctgagccacttggaggagtacttaaagcaggtgggtgggacagaggagtactggctgtctcagatccaaaaccatatgaacggtccagctaaaaagtggtgggagtacaagcaggactctgtcaagaactgggttgagttcaagaaagagttcctgcagtacagcgaggggactctgacaagggatgctatcaagagggagctggatctaccccaaaaagagggagaacccctggaccagttcctctggcgcaagagagacctgtaccagaccctctatgttgatgcagatgaggaggagattattcagtacgtggtaggaaccctccagcccaaactgaagcgcttcttgagctatcccttgcccaagaccttagagcagctgattcaaagagggaaggaagtccaaggcagcatggaccactcagaagagcccagtcctcagaggacccccgagattcagtctggggactctgtagagagcatgcctccctccaccactgccagtcctgtgccaagcaatgggacacaacccgagccccctagcccaccagctactgtcatatga

SEQ ID NO: 48 - DNA, 3043 bp, Dipodomys spectabilis
atggagctggaccgcatgaccaccggcggcctccacgcctaccccgggccgcggggcgggccggcggccaagcccaacgtgatcctgcagatcggtaagtgccgggccgagatgctggagcacgtgcgcaggacccaccggcacctgctggccgaggtgtccaagcaggtggagcgcgagctgaaggggctgcacaggtccgtgggcaagctggagagcaacctggacggctacgtgcccaccagcgactcgcagcgctggaagaagtccatcaaagcctgcctgtgccgctgccaggagaccatcgccaacctggagcgctgggtgaagcgcgagatgcacgtgtggcgggaggtcttctaccgcctggagcggtgggccgaccgcctggagtccatgggcggcaagtaccccgtgggcagcgagcccgtccgccacaccgtctccgtgggcgtggggggtcccgagggctactgccaggaggccgacggctatgactacaccgtcagcccctatgccatcaccccgccccccgccaccggcgagctgccggggcaggagcctgccgaggcccagccgtaccagccctgggggccaggcgaggacgggcagcccagcccgggcgtggacacgcagatctttgaggacccccgggagttcctgagccacctggaggagtacctgcggcaggtgggcggttctgaggagtattggctgtctcagatccagaaccacatgaacgggccagccaagaagtggtgggagttcaagcagggctcggtcaagaactgggtggagttcaagaaagagttcctgcagtacagcgagggcacactgtcccgggaggccatccagcgtgagctggacctgccgcagaagcagggcgagcccctggaccagttcctgtggcgcaagcgcgacctgtaccagaccctgtacgtggacgccgatgaggaggagatcatccagtatgtggtgggcacgctgcagcccaagctcaagcgcttcctgaggcatccgctgcccaagacactggagcagctcatccagaggggcatggaggtgcaggacggcctggagcaggcctccgagccggctggcccccctctgcctgccgaggatgaggccgagaccatcactccagccctcaccagcgagtccatggcgagtgaccggacacagacagaatagagcccagcccagggcccccccagcctgcctgccacacctagcctgtggcttttgccaaccaggacttgagctggggctgattcccccccactccggggggagctctggccagctgggcccccacacgccccctggcctgatgcagacacaagcaaccaaaacagcaaaggagttactctcctgcaaggctcctgcctgcccctccctcgtctgtcttcctgtcccctctcccccatggccagtggtcccatcgtcctcacactcaggccactgcagaagacccccagcttcctcattctgctccaaagccccggccctctggtccggacagcaagagccaatgggctccccagctcacgggtaccccagggcagaagctccagagaaccagtgcccagggaacttcggcttctggggacaccgcctgctcctggcagacacagtagagccggcggccaccctcgtgtcctcccggggacaagccggccagcttcaggcagcatggcgcccctggcaggggcgagctgagaccacagctccagcagcttcagcagtagacctgatgtcccggtgtctcctggccctcaggtgagccctgctcagtgacatcttagagctgcgggggggagggggagcaggttcgttttcaggaggagccgctgagggacagggtggaaatggcctcctgggaacacagatactccagggactcaagaaggggctgggctgggggctgggccgggggaggttgctgagcaagctcacagagaccctgtgctttctcgccccagcatagtgattcacggcagtttggagacgaaatcggctcggatgactcagccacagcggcagagggtcccagaagggctggctgaggcaagaaactgcactttcggagccaggagaatgacaccaggtaatggagcccgtccctcctgcccaacgctaccccttgcccactgtcctcatgaggcccactcccctgacctccaggtgagctgggaggctcggccagcgtcgggcactccagcctggggaaggcagcccatccacctgtccacccgtccctgatagatagtttgagtgaggctggcacgtggctgcactgacctgctgcttctgcttctccccaggtctcaaggcttccgaggagtctttgctgctgtgcctggcgctgtcccctcttctctctctgagctccctgcacacgtcctggagcagcagagagagtgtggctgcagagaagcagtggcctggcagagggcagcacccagctcagcccgagagctggcagtggacaggccagcgtgagggcccgggcttttgccacgctggccccgctggccaccagatgcttgcccccagagccaccacagctgagcggggttccctgcctggccgcccggccccgagccccggctcgctgtgtggtcctcacttcctgccagagccctccagcagccctgaggccgctgccccttccccgccgtcccagcccagcccagcaggcccccaggtctctcctgctgggttgttccaggcatcctgccctgccctgctgttgcccaggctaggctccattcaggccctgtccatccccagcaccagtcctgggggctggaagccgctcatgcctgcagctcagcaggccttgcccactggaactctggaatctggggatttattctgcagacacccatacagacgctcccctgtgcccctgccagccccacagatttatttttgcagaagccatacccctcttcattaactggcacaggtgcagggggcctggggtcgagaccacaggtgcccactgtcccctccctccccgaccggactgtgtaccctg

SEQ ID NO: 49 - DNA, 2822 bp, Sceloporus undulatus
tagctctctctgctttgcagctcccagagattcagagctcttgtgattgggaagttcgcagaagaaaggaaaggcagaaaacagcattggcagaggcactggcaagagtttgcggctttgcatcttctcaaggaggaacacaacctgccagggtcagggatcagtggcaacgggcaaccgacggacccagacctgacaactttcttcatttgtttgtttctcctggacttggacggctgtagtgcaagtggaccccgacggcgactctttctggggtgatttctgattcagttgtgtttgtggttttgtagagggaaataggtagttctcttcagaacaggttggtggcaaaggggttgcttaaaaagggtgaaggtacagttaggctatagctgcagagctagcaactatgcagttggagaacttcaaccacgggaacatccactctttccagggccaccgtggggtggtcaacaacaacaagcccaatgtcatccttcagataggaaagtgcagggcagagatgttggagcatgtcaggagaacccaccggcacctcttaactgaggtttcgaaacaggtggagcgggaactgaaaggcctgcagaaatcagtggggaagttggagaacaacctggaggaccatgtcccctcagctgctgagaaccagcggtggaagaaatccatcaaggcctgcttatctaggtgtcaggagaccattgcccatttggagaggtgggtcaagagggagatgaatgtctggaaggaagtttttttccgcctggagaaatgggctgaccgtctagagtctggcggggggaagtactgccatggggatacttccaggcaaactgtctctgttggggtaggaggcccagagatcaggcctagtgaaggggagatttatgattatgccctagatatgagtcagatgtatgccctgacaccacctccatcaggggacatccctgtggtgcctcaacctcatgaatcctatcagtggatcactgccccagatgatacaccaccttctccagtggagacccagatttttgaggaccccagggagtttctcactcacctggaggattacttgaagcaggtaggtgggactgaggagtactggctctctcagattcaaaaccacatgaatggccctgctaaaaagtggtgggaatacaagcaggactctgtcaagaactggctggagttcaagaaagagttccttcagtatagtgagggcaccctgacaagggatgctatcaagagggaactggatctccctcagaaggaaggggagcccttagaccagttcctctggagaaagagggacctctatcagaccctctatgttgaggctgaggaggaggaggtcatccagtatgtggtagggaccctccaacccaaactcaagcgtttccttagccatccctaccctaaaactttagaacagctgatccagagaggaaaggaagttgagggcaacatggataactctgaggaccccagtcctcaaaggaccccagaacaccagctaggagattcagtggaaattttgcctccttccaccactgctagtcctgcagcgagtgacaggactcagccagagatttctgtcccaccaaccacagtgatatgagctgtgtaatgagacaaaaatgatccagatgggagctggagacttacttaggatgattgtttcctatcagcagaaactttcagccatgaatggtctgatgatattctcagtccaatggccgatagaaggagaattgcctattctttgaggtggaccatgtggagaacatggtttgcctgaatcactcaaaggtggtacaaactggagtactaatggctattttgatgatatttttttaaagccattacaaaggcaaccagtccgttctctgtggcagaactggctaccttccttttggcattggttgccaagggaattaaagaggcacaatagaggattcttcctgcttataaccagtcctgtccttcaacatgcttttcctcccaggcattctcccttcctttcaggaatctattccaaatgcttattgcttacctctgtattaatcaatgggctaactctctggaaagccactggtttctgctttccttccatttcctccagcttatagtgtgagatcctaacagactggaggactttttgcaagttgcctccagaagctcaccaggagtttcagccatgaaattaacccaatgcctgctctctccctactccaagtgggtctgtggattcttgggctctgacctgattattcagggctttcagttccagaaaagccattttcgctatacattcaacaatggatgacagctagacctaggttatttacttccctaccttctagactttaggagaagaggggttagccagggtgggatacctactttgctcactcattaggacgctaagatgttctttccttgtggctagatcactagcaggagaagggaatatgctatcagttatctcgagtgactcaaggaaagatcagattgcactccaaagctataccagagttatactcctaaattatgttaaagcagggtgggtgggatatacaaacacagcttgaattcaggtgtgaagctgtccacatctctgcctcaagacaacagagacactgcattcatgctctcctactttcttgcttgaaagacaaactggacactttagtgagctatcaatgctgcgacatcttcagtgccgtgctagctgagctgatatattttcccctcataatcagactgattttagaaatgagagcttgaagaaacctcgggtc

SEQ ID NO: 50 - DNA, 6118 bp, Corvus kubaryi
ctggactagtggcagttcagacagggaagagaagcagctctttgcatctccagtgaaagcggttttgactcaccaagtttgccagaggagaaatcacccggatttttgctgcagcttccagcttctttgtgcatctctgtgtgattttctccggcggggacttcgaggcattcgagattctcagcgggatttgacatcttatccaactcctctccttgttcctggaggatcctggttctctctgggacacccctgagcacgtgagaccggcgtttccagctgggcaccgggagaaatttgcctacaactctctctgggatccacgtggaccgaccagctcgctctgcggtgatatctgattgggttgtgtttgtgtccaaaagtctttggcggggggtttagaagtctctgtgtgtctttcaggaagtgttgtggtgggggtttttgggatccagctttagtgccagggcttataacccacttatttccgtgtttgccactcgcacggtcggagccatgcagctggacaatgtcaccagcgcgggcgtccactccttccaggggcaccgtggagttgccaacaaacccaatgtgatcctgcagatagggaagtgcagggcagaaatgctggagcatgtccggaggacccaccggcacctcctgactgaggtctccaagcaggtggagcgggagctgaagggattgcagaaatctgtggggaagttggagaacaacttagaggaccatgtcccaactgaaaaccagagatggaagaagtccatcaaggcctgcctggccagatgccaggagaccattgctcacctggagaggtgggtcaagagggagatgaatgtttggaaggaggtctttttccgcctggaaaagtgggctgaccgcctggagtccatgggaggcaaatactgccccggggaacagggcaagcagacggtgtccgttggggtgggaggcccagagataaggccaggtgagggggagatttatgattatgccctggacatgagccagatgtatgccctgacccctcctcctggggaggtgcccagcatcccccagggccacgattcctaccagtgggtctccgtgtcggaggatgctccagcctccccagtggagacccaggtgtttgaggatccccgggagttcttgagccacttggaggaatacttaaagcaggtgggtggaacagaggagtattggctgtctcagatccaaaaccacatgaacggcccagctaaaaagtggtgggagtacaagcaggactccgtcaaaaactgggtcgagttcaagaaggagttcctgcagtacagcgagggaactctgactagggatgccatcaaaagggagctggatttgccccagaaagagggggagcccctggatcagttcctttggcgcaagagagacctgtaccagaccctctatgtggatgcagatgaggaggagattattcagtacgtggtaggaaccctccagcccaaactgaagcgtttcctgagctaccccctgcccaagaccttagagcagctgatccaaagggggaaggaagtccaagggaacatggagcactctgaggagcccagcccacagaggacccctgaggttcagccaggagactccatggagaccgtgcccccctcaaccactgccagtcccgtgccgagcaatgggactcaaccagagccccccagccccccagccactgtcatatgagctcccctgaggggggtctgagttccgtggaagggagaagggggcttatttaggaagcttctccttggagggaggttctggctgagatgggacctgaggagtgctcagtccaacagcccggagcagagggattgactttgctcgtggggggagggaggaggtgggggagaggcgcctcaggatggggttgcccccctcacccaggccatgccatgcggtggtgctggggaccctgctggcaccactgtggggaacagccaattttatgagaattccctgccaagaaactatagagataattcccaacttgtgaagcagccgctcggcactagcggctctcaaggacttcatacgagtgcagtagttggtggagggttcctacccatctggatctctctttttccttctctcctccctcttctgagagggtggccctgtcctgcagagacagctttcttttgacccttgcctgtttttgattagcctctgggtttctgttcactcagcaatctcctgctcttacttgctccaaaggattaaagtaattttttggattattttttgttttaagaagaaaaaaaaatcctattattttaggagctgaaagctttaagaatctgggttattttctgtggttttcatttcactgcacctaatacctgctttaatgggtttcctctcaagaggctcgtagtggtttacttcttgtcttagtttctgctcattccagttcaaggccactgcagtgcagaggcgaatttcatcctttctctgcacattatcctgtgcattcagcaggaaacagattttctaattaaattctgagctcatttcttgaaggagcagtctccttcctttcagagaagagagggtgttcaaggtagagagaggagacaccagagctcttttgagagagagtggggggagggaagggaattaaatccttattctttgactgaaacaagcaaacacaccctaaaatcagagcaaaatatccccagagcagcaaatcgagtccatgctgatgtgtggagacaaaaggagcttttgccatgtcaaagccaaaagaagtgaagagaggatctgtgtgccccagcacaatttcagcctgtgcaccacagccaagagttcctgctcacacagacagactccaaatgctcttggaaagcctggcatctctgtcctggagcacctgaggacagagtgttgtctgctcacaaagaacttcctgcaacatctcgccacggatggagatggacttggactttgtgacattttccacgctgagacaggaaatgctcggtgctcacctttggccagcgtttgatgataggactgagagatgaaagacattcctgaagtttggctctccaaagcttcctgaggctggacacatcttgggcagcatctgcatccaccaccagaccaaataatcagcagggatgcagcagcaggagtgaccctgggatgctcctggcactgccacagcggtgacatgtggcactggtggctcagaaggcctttgctgtgactccttccaagaggctgaaggtaaggcagctctctggcattctctcctcagagctaaactggtcaccgaatgtccagtagaaaacttgccctgggataaaaactaatctgaattgggatatgaagcattggggttgggagaaagaggaagggagagccagccaaagggaaatacaggacagggactaggaaaagtttccaaagagggcagtatcctgcactttctgattaatgtgggaaaagaatggaaagcttcttaattagcccagccccaggacctgcctcgtccttcatggagaagctctgggcttgagtccccacccagagcagcacatcccaggtcgatgcacaccccaaaggagctgcaggtctgctctgcatccctgctaggagctggtgtcaggaatggtgggagctgtcctctcccttgttcccggtttgtcaacagctctgtgtgcagagaaaggagcatttctcactaatgaccggggctgagtgatgggggagtgggagtcactgctgaggatgagctggccatgtattacaagctgtatctcctcttgcttccagtgactcactcagatcctcctctgggaaggaatcacttcacagcattcagcatttggaagaaaagccacagaaaaatctgcaaaacaagggcctcaccatcagagctgctctcaggaccctcagccaccacctgccagatccaccacctgaaggaaaaattggcacaggtaattacatcccatattaccctgtgggccttccttaacctccccagagccctgacacaagatattgaacagcccaggttttgaaacctcagccccagtggctgcagcagcctggcaccaccagagaggtgggatttcagcttcttgatgtcagaacccaagcatcagccccaataattgatgctccagggactgcacattgtggctttcccttggctggactatgggcacatccttagatcccaacacctggtgggtcatccaggctgcaggcacagcaaaatttaatcccaactcctgaaaaacttccctttctccccacttccaaaatctaatcagagctggtgcattttttttttttccagcgatccctgctgctgttgctgagattccttctctgtgtccaagaactttcccaggggacaagcgagtgctgcaggaagacagagggcaaatcatgcaccaaagagcctcccatgcagtgcaatgccacgttcaaggtgctgagagccagaatgaaatggggaagccgcttccaacaggacaaagaaaagcctgagctggtccaggtattccaagcacagaagaaagtgctgagaatggaaggacaggccaggacagaagaaccaagtccaggctttggggacagcgggatgctgggcttgtgctgactgtctgtggagaggattcctcacctctgcgatttggggccgctgggacttaccctaaagaaatcttcactagataatgatcctcactgaaaaaaaactttcctgattaactttgccaaggggctgatcctgccttggctacgaaccctccccgctggccgtgctgtaactcacctctcctgagtcgggggtagcttcatttcatgcgggtagcagttccaaacctcaaagggctcctggagtttggagaagcatcccatggtccagatgcttgtctgaactgttggagcctgcatatctgggccagctgtcttgccagcaagaagcctcatgaggcagcaggcgctctctgggtctgcatgggccagagttactgcaagaactggggttcttgtgctggctttggagtgactgtttccatccagacccagggagcccaaaaagagctcgagtgagctggacaagacagttttggttcatctctcagctgaagaggtctagctggttcctctctcttccagagccagctgtcctgggtgtgtgtgtgtgtgtgtggcagtgtgggggatgtgtgtgttgagcaaaaaaatccacattattcaaattctgtggtgttttgttgcatttgaattaagccagagggacctaaggtacattccaacaatgctcagcaaaaatgtccaggactggaaaattccataaaaccatgtaaaggcagattcccaggcatcatcttaaggtctaaatgatatttgattttgaggtgcttaatttccacagtctcttctaagggacttgactgcctcaataggcattttatttttcctgtcttttttagggaattagcctgtctgtgctacttgatcatttggtcctgaggtttttacattttcagctggctttttggagtgtgcagaactgaatcttctggactgatctgatttcaattgttgctcccagcaaattggagctttacttgtagcaccctggttttttattaccagcctctccaggaaggactggtagtttattttcctggggcagagtcacgtgaatgagaagcgtggatgtgttgtacctctggaactttagcagatttcaaccactgcattttttcctccctaggcgattttacatttactgatgaaatgactttagagtttttatttttactagagatattattaattcaaacaaccttgtacaaaaggcaaacatgtggaatcgctgcaggttataggggttgaagccaaaaggtctttgtaagccgacatcacctgccctagatctgactgtatcaggcagtttattcctcatgtgtcatgttggagttacaagatcacaccaagccactagaacctgtcagtagaatagtgctacgctcaatttgctattgtagcaaagccttttgtagatttatacaataaaactttgaaatatctgcttcaa

SEQ ID NO: 51 - DNA, 3523 bp, Vulpes lagopus
gctcggcgaggggccgcccacggccgcgctgccgcataaagagccggcggccgcggcagggcgcagagctcggcgccgcggctctcggctcctgcgggcagctccgctcctccgctcctccgcgctgctccgcgctgctccccgctccccgctcctccgcgctcctccgcgctcctccgcgctcctccgctgccgcagcgccgcgggcaccgaagggaccgccccggccccaccgcagcccgcccgggagcccttcgcagccgtttcccgcccgtccgagcgcccggccacctgcgcacagatggagctggaccacatgacgagcggcggcctccacgcctaccccgggccgcggggcgggccggcggccaagcccaacgtgatcctgcagatcggtaagtgccgggccgagatgctggagcacgtgcgcaggacccaccggcacctgctgaccgaggtgtccaagcaggtggagcgggagctgaaggggttgcacaggtcggtggggaagctggagagcaacctggacggctacgtgcccagcggcgactcgcagcgctggaggaagtccatcaaggcctgcctgtgccgctgccaggagaccatcgccaacctggagcgctgggtcaagcgggagatgcacgtgtggcgggaggtcttctaccggctggagaggtgggccgaccgcctggagtccatgggcggcaagtaccccgtgggcaacgagccggcccgccacaccgtctcggtgggcgtcggggggcccgagggctactgccaggaggccgacggctacgactacacggtcagcccctacgccatcaccccgccgcccgccgccggggagctgcccggccaggagcccgccgaggcccagcagtacccgccctggggccccggtgaggacgggcagcccagccccggtgtggacacgcagatcttcgaggatcccagggagttcctcagccacctggaggagtacctgcgacaggtgggcggctccgaggagtactggctgtcacagatccagaaccacatgaacgggccggccaagaagtggtgggagttcaagcagggctccgtgaagaactgggtggagttcaagaaagagttcctgcagtacagcgagggcacgctgtcccgggaggccatccagcgcgagctggacctgccgcagaagcagggggagccgctggaccagttcctgtggcgcaagcgggacctgtaccagacgctctacgtggacgccgaggaggaggagatcatccagtacgtggtgggcaccctgcagcccaaactcaagcgcttcctgcgccacccgctgcccaagaccctggagcagctcatccagaggggcatggaagtgcaggacggcctggagcaggcggccgagcccgcgggcccccgcctccccgccgaggacgaggccgaggccctcacgccagccctcaccagcgagtctgtagccagtgaccggacccagcccgaatagaggccagcccgggccccagctgcccaccacaccccacctgtggcctttgccgaccaggactttgaagctgggctgactcctgcacgggggagcccctcatcctcatccggctgggccccccacctcagcttcccagcctcacacagacacatgtcatccagctgtgggcacaatcccccaaacgccgaagggccgcgggcccccggccccctccctctgtctgtctctcctggcctctgaccccaccccgcacaccctcaggccacgaccggccctcccagcttcgttattctgctcaacgcccgggccctctgggcactcaggaatcaagtgtccagatggcgcaggccagtgagcaccacgcccaggggacgccccagagcagaagctgagacagcaccacgggaaccttggcttggggcgccgcctcctcctggcagttgctgccgccggctggcgctctatcgccgccgcccagggcatccggccagcctcaggcagcgcggctccctcctgctggccccgagccgcagcctcagacccggagccgcagacgcagcgcggcagcaccgcagcctccgcagacctggcgtcctggtgcctcctggcccctcaggtgaggctctgccccgggcacggccgccagggggcactgcggggcagggagggccccgggccaggtccgctctccaggtgaaccccccccaggcccagagacatccccggcaggttagctgcagagatggggggggctgcagggatggggagtggtggggggggccagaccccaggtttcggggagatcggctgggctgggtgcggctctcacatgaccccgtgcactctctctcctcagcaccagtgattcacaccagcctggaaaaggatgggctgggcgcgatgactcacccccggcaggcggagggtcccacagggccccagtcctcaaactcagctgaggagccaggagggtgacgacaggtacgtggctgtctctccacggagaccctgaccctcagctggcccccctgctcccccaggatcccagctcccccccccatgcagacagcgctcggcccgggcaagccaagaggcggcccatcacgggggccacagcccatcacgcccgccccacagccccccgtgcggcccctcccgcctccggcctggccctgacccccctaacctccttgcgtctttccctcaggtctcaggctcccgcagagcctttgctgctgtgcctggagctgcccccctcctcctgcgagctgcctgcaccgaggagacaggagacgaggggacattgaggtcggcgagggggtgggcccggcagcgggctgctgacgaagacgggccagcgtgagggccggggctgccacgaggcctgccccgctggccaccagcccgcccgcccgcccccagggcccctgcggctggcgtcggggtctgctccttgggccccgtctcgctccagcccaggacccccgccaccgaatggtggccgccccctcctgccagagctttccaggagctctgaggctgaggccacagccccagccccgcccgcaggcccaggctcccccgccccaggagatcacaggagcctcgccctggggcttagcaggctctctgccaggccccactgagccccgggcacggacccccacccctcccggcacccacaccccggtgctggccggccactcgtgtgtctgcagcccgagcaggccctggctgggggttctcgtttctgcctgcccagagggggttcccagattccgggtgactgtcaacccctccatcctgcacccctgccagcctcccccccagattttatttttgcacataagccataacccgtactcacaggctggcataggctgcagggaggccccggggtcctcaagacggtggccggtcccccccccaccccccgtccccagcgggtcaggccaggtcgtgtgtacccctgccaccttacctgaagacagactcttttgtaagattttgttaataaaacaatgaaacttc

SEQ ID NO: 52 - DNA, 3519 bp, Microtus oregoni
gcgagctgccgcccacgggccccgcgcagcataaagagccgcagccgccggctccagcgcagtgctgaggcgaccagtcctcctgcaactgcagtctctgggcctcaccagcttcagcaccggcgcgcctgccactcttgccgagttccgcgcatcaccgagcacctgccactgccgctccgcgcctgccgctgccgcctcggctgccatcccgcttccgccccagaggagttctcagcctgtctggacccgctgcacctgcgagcagatggagctggaccataggacgaccggtggcctccacgcctaccctgcccagcggggcgggccggcagccaagcccaatgtgatcctgcagatcggtaagtgccgagccgagatgctggagcatgtgcggaggacccaccggcacctgctgaccgaagtgtccaagcaggtggagcgagagcttaaagggttgcacaggtcggtgggcaagctggagaacaacttagacggctatgtgcccaccggtgactcacagcgctggaagaagtccatcaaggcctgtctctgccgctgccaggagaccatcgccaacctggagcgctgggtcaagcgtgagatgcacgtgtggcgggaggtcttctatcgcctggagaggtgggccgaccgcctggagtccatgggcggcaagtacccggtgggcagcgagccgactcgccacactgtctctgtaggtgtggggggtccagagccctactgccaggaagctgatggctatgactacactgtcagcccctatgccatcactccaccacctgctgccggagagctgcctgaccaggaatcagtggaggcccagcaataccagtcttgggggtcaggtgaggatgggcaaccaagccctggtgtggatacccagatcttcgaggacccacgggagttcctgagccacctggaagagtacctgcggcaggtgggtggctccgaagaatattggctgtcccagatccagaaccacatgaacgggccagccaagaagtggtgggagttcaagcagggctcggtgaagaactgggtggagttcaagaaggagtttctgcagtacagtgagggcacgctctcccgtgaagccatccagcgggagctcgacctgccgcagaagcagggtgagccactggaccagttcctctggcgcaagcgggacctgtaccaaacactgtatgtggacgctgaggaggaggagatcatccagtatgtggtgggcaccctgcagcccaagctcaagcgatttttgcgccacccactgcctaagactctggagcagctcatccagaggggcatggaagtgcaggacggcctggagcaggcagctgagccttctggaaccccactgcccacagaagatgagactgaggccctcacacctgcccttaccagcgagtcagtagccagtgacaggacccagcctgaatagatggatcaaaccagggtccccagcctgcctgccacaaccagcctgtggcctttgccaactaggacttgagctggggctgactcccaaagcggtgccctgttcagcctggcatctactcaccccctggcctgactcacagacaactgccacacaaccatgctacatggactgaacatgaagaagcccctctcccacagtgctcccacccgtcacctgccctggccctgtcccgagtcacgctggccttaccctccacattctcagaccatcatagaacacctttgacttcttcattctgctccagtgcctgggccctttggggcagtaggcaccacaccacagagcaccccagagcagaagcgagagcagaatcagtgccgagagaacctcaaccccagggatacagcccgctcctacagacacagcagatccagctggtaccctagctgcctcccagggcaactgaccaaccttggtcagcatagctccctcctaggggtgagctaaagccacagtgcatctgaagcagcagacctgacatcatggcacctcctggcctctaggtgagccctgccccatgtatcttagagttggggtggggaggacacaaccaagttcattttccaggaagccttcaaggcttctctagcaaattaactgcagggacgggatggagtggaatcagggtgggtgccaacatagtgggcattgggaccgcaggggtcaaggagggggctgaggagggggcagtactgggggagtttgctgagccagctcacagagaccctatgctttctcaccccagcagtgattcataccagtgaagaaaagcagagctcagctccatgactcagccgtggcaggcggagggtcccagaggggctgagtcctcacacccagctgagacagcagctggcaccttcagagccaggagaatgacatcaggtaagagagtcttgcctcctgccctgatcaggtcccagatcccagccactctccagatctctgggttttctgagaagtcctcacaggccccggggcacctgttggggggcaggatagcctactgcccctcccagatctcagggtgagcagttctctaaccatctcgctgcttcctgtctccctcaggtctcaaggctgctgagaagtcttcctcaccatgcctggaatgggcaccaccacagcaccggcaccgtcccctcctctcttgaagctgtctgcacagaagttccaagacacttgcagagcagagaaaacatgattacagagaggagacgcctggcagagggcagcaccccaactcagcctgagctgaagatgaagataggccagcgtgaagccagggtctgccatgatgcccaccctgctggctactagctgcccgccatgagccactgcagcttgagtagggtctgtgctcctcgccctctttgcgcagaacccagctcgctgtgtggccattggccccccccgccagaacctggcaggagccttagggcttgggccccagcccagcctcccccttcctgctgtgccctgcctgccggtccaagcccagcccagtcccaggagaccccaggccttggctcctgggctgttccaggcattccctgccctgccgtgcagtggctcagctgaatcgcatccagctgcagcaccactgcctcgtgctggctggtcactgctgtgtctgtggtctgagtaggccttgttgaggttcctcggtctgactggtccactggtgtcctgggaccagttccactgacgtctgacagatcctatgccccatgcccctgccagtccccacagctttatttttgcacataagctacgacccatattcatttgtttggcacagggtgtagggaggtccttgggactagggagaccctgaagatcacaagagagtgtggctatcccctattcccatcaagccttgaaaatgtagtcaggccatctgtccataccatcttacctcgaagacagatttttatatagatatagagatacagatatatatatatatatatatacacacacatataagattttgttaa

SEQ ID NO: 53 - DNA, 1333 bp, Pyrgilauda ruficollis
gttgtggtggggatttttgggatccagctttagtgccaggggcttataacccagttcttcccgtgtttgccactcacacggttggagtcatgcagctggacaatgtcaccagcgcgggcgtccactccttccaggggcaccgtggagttgccaacaagcccaatgtgatcctgcagatagggaagtgcagggcagaaatgctggagcatgtccggaggacccaccggcacctcctgacagaggtctccaagcaggtggagcgggagctgaagggattgcagaaatccgtggggaagttggagaacaacttagaggaccacgtcccaactgaaaaccagagatggaagaagtccatcaaggcctgcctggccaggtgccaggagaccattgcccacctggagaggtgggtcaagagggagatgaatgtttggaaggaggtctttttccgcctggaaaagtgggctgaccgcctggagtccatgggaggcaaatactgccctggggagcagggcaagcagacagtgtccgtcggggtgggaggtccggagataaggccaagtgagggggagatttatgattatgccctggacatgagccagatgtatgccctgacccctcctcccggggaggtgcccagcatcccccagggccacgattcctaccagtgggtctccgtgtcggaggacgctccagcctccccggtggaaacccaggtatttgaggatccccgggagttcttgagccacttggaggaatacttaaagcaggtgggtggaacagaggagtattggctgtctcagatccaaaaccacatgaacggcccagctaaaaagtggtgggagtacaagcaggactccgtcaaaaactgggtcgagttcaagaaggagttcctgcagtacagcgagggaactctgactagggatgcgatcaaaagggagctggatttgccccagaaagagggggagcccctggatcagttcctctggcgcaagagagacctgtaccagaccctctatgtggatgcagatgaggaggagatcatccagtacgtggtaggcaccctccagcccaaactgaagcgtttcctgagctaccccctgcccaagaccttagagcagctgatccagaggggcaaggaggtccaaggcaacatggagcactctgaggagcccagtccacagaggactcctgaggttcagccaggagactccgtggaaaccgtgcccccctcaaccaccgccagccccgtgcctagcaatgggactcaaccagagccccccagccccccagccactgtcatatgagctcccctgagggaggtctgggttccgtg

SEQ ID NO: 54 - DNA, 2346 bp, Onychostruthus taczanowskii
tgcatctccagtgaaagcggtttttgactcacctagtttgcccgaggagaaatcacccggatttttgctgcagcttccagctttgtgcatctctgtgatttcctccggcggggactttgcggcgttccagattcccagcgggattggacatcctatccaactcctctccttgtccctggaggatcctggttctctctgggactcccctgaacacgtgagaccggcatttccagcttggcactgggagaaatttgcctacaactctctctgggatccacgtggaccgaccagctcgctctgcggtgatatctgattgggttgtgtttgtgtccaaaagtccttggaggggggtttagaagtctctgtgtgtctttcaggaagtgttgtggtggggatttttgggatccagctttagtgccaggggcttataacccagttcttcccgtgtttgccactcacacagtcggagtcatgcagctggacaatgtcaccagcgcgggcgtccactccttccaggggcaccgtggagttgccaacaagcccaatgtgatcctgcagatagggaagtgcagggcagaaatgctggagcatgtccggaggacccaccggcacctcctgacagaggtctccaagcaggtggagcgggagctgaagggattgcagaaatccgtggggaagttggagaacaacttagaggaccacgtcccaactgaaaaccagagatggaagaagtccatcaaggcctgcctggccaggtgccaggagaccattgcccacctggagaggtgggtcaagagggagatgaatgtttggaaggaggtctttttccgcctggaaaagtgggctgaccgcctggagtccatgggaggcaaatactgccctggggagcagggcaagcagacggtgtctgtcggggtgggaggtccagaaataaggccaagtgagggggagatttatgattatgccctggacatgagccagatgtatgccctgacccctcctcccggggaggtgcccagcatcccccagggccacgattcctaccagtgggtctccgtgtcggaggacgctccagcctccccagtggagacccaggtgtttgaggatccccgggagttcctgagccacttggaggaatacttaaagcaggtgggtggaacagaggagtattggctgtctcagatccaaaaccacatgaacggcccagctaaaaagtggtgggagtacaagcaggactccgtcaaaaactgggtcgagttcaagaaggagttcctgcagtacagcgagggaactctgactagggatgcgatcaaaagggagctggatttgccccagaaagagggggagcccctggatcagttcctctggcgcaagagagacctgtaccagaccctctatgtggatgcagatgaggaggagatcatccagtacgtggtaggcaccctccagcccaaactgaagcgtttcctgagctaccccctgcccaagaccttagagcagctgatccagagggggaaggaggtccaaggcaacatggagcactctgaggagcccagcccacagaggactcctgaggttcagccaggagactctgtggagaccgtgcccccctcaaccaccgccagccccgtgccgagcaatgggactcaaccagagcccccaagccccccagccactgtcatatgagctcccctgaggggggtctgggttccgtggaagggagaagggggcttatttaggaagcttctccttggagggaagttctggctgagacgagacctgaggagtgctcagtccaacagcccagagcagagggattggctttgctcctggggggagggaggtggtgagggagaggcaccccaggatggggctgcccccctcacccaggccgtgccatgcggtggtgctggggaccctgctggcaccactgcgggggacagccaattttatgagaattccctgacaagaaactacagacaattcccaacttgtgaagcggccgctcggcactggcagctctcaaggacttcatatgagtgcagcagttggtggagggttcctacccatctggatctctctttttccttctctactccctcctctgagagggtggccctgtcctgaggagacagctttctttttcacccttgcctgtttctgattaacctctgggtttctgttcacttggcaatctcctgctcttacttgctccaaaggattaaagtaatttttttgattatttttttataagatgaaaaaaaaatcctattatttcaggaactgaaagctttaagaatctggattattttctgtggttttcatttcactgcacctaatacctgc

SEQ ID NO: 55 - DNA, 1330 bp, Ochotona curzoniae
tgcgcaccatggagctggaccatatgacgacgagcggcggcctccacgcctatcccgggccgcggggcgcgccggccgccaaacccaacgtgatcctgcagatcggtaagtgccgagcggagatgctggagcacgtgcggaggacgcaccgccacctgctcaccgaggtgtccaggcaggtggagcgcgagctcaaggggctgcaccgctccgtgggcaaactggagaacaacctcgagggctacgcgcccaccggcgactcgcagcgctggaaaaagtccatcaaggcttgcctgagccgctgccaggagaccatcgccaacctggagcgatgggtcaagcgcgagctgcatgtgtggcgcgaggttttctaccgactggagaggtgggccgaccgactggaggccatgggcggcaagtacccggtgggcagtggcgagcaggcccgccacaccgcctcagtgggcgtggggggtcctgagggctgctgccaggacgtcgacggctacgactacagcgtgagcccctacgccatcaccccgccgccggccggcgagctcccggggcaggagcccggtgaggcccagcaataccagccgtgggtgaccggcgaagacgggcagccgagtcccggggtggacacgcagatcttcgaggatccccgcgagttcctgagccacctggaggagtacctgcgccaggtgggcggctccgaggagtactggctgtcgcagatccaaaaccacatgaacgggccagccaagaagtggtgggagttcaagcagggctccgtcaagaactgggtggagttcaagaaggagttcctgcagtacagcgagggcacgctgtcccgcgaggccatccagcgcgagctggacctgccccagaagcagggggagccgcttgaccagttcctgtggcgcaagcgcgacctctaccagacactgtacgtggatgccgacgaggaggagatcatccagtacgtggtgggcaccctgcagcccaagctcaagcgcttcctgcgccatccgctgcccaagaccctggagcagctcatccagcgggggttggaggtgcaggatggcctggagcagggggcccagcccgccgccgaagaggagacggaggccctcacgcccgccctcaccagcgagtccgtggccagcgaccggacccagcccgagtagggggcagcctccccaccgggcccagcccgggcttttgcccactgggactcttgtgctggagccgactcctccggccctcatgcggccggataccccctcagcctcgggccagacctgcacggacagactccggctcttccaga

SEQ ID NO: 56 - DNA, 1824 bp, Falco naumanni
gaagcagctcttgcatctctagtgaaagcatttttgactcgccaagtttacccgaggagaaatcaccaggatttttgcagcagcctccagcttctctgtgcatatctgtgtgtttttctccagcggggactctctgctgttcaagactctcagctccggatgagcaggtagcgggcacgcgtgtggggctggatgtcttagacaactcctatccttgttcctggaggatcctggctctctctgggacaccctgagcacgtgagaccagcgtttccagctaggcactgggagaaatttgcctacaactctctctgggatccacggggaccaaacgtcttgctctgcggtgatatctgatttggttgtgtttgtgtgaaaaagtcctttgaggggggtttaggagtctctgtgtgtctttcagaaagtgttgtggtggggtttttgggagccaggtctagtgccagggtttacaacagtcttttccgtgtttgaaactcgcacagtcggagccatgcagttggataatgtcaccagtgcaggcatccactctttccaggggcaccgtggagttgccaacaagcccaatgtgatcctgcagatagggaaatgcagggcagaaatgttggagcatgtcaggaggacccaccggcacctcctgtctgaggtctccaagcaggtggagcgcgagctgaaaggcttgcagaaatcggtggggaagttagagaataacttggaggaccatgtcccaactgataaccaaagatggaaaaagtccatcaaggcctgcctggccagatgccaggaaaccattgcccatctagagagatgggtcaagcgagagatgaatgtctggaaggaagtctttttccgtctagagaaatgggcagaccgtctggagtccatgggaggcaaatattgtcctggggaccatggcaagcagactgtgtccgttggggtgggaggcccagagatacggccaggtgagggggagatttatgactatgcccttgatatgagccaaatgtatgcactgacccctcctcctggggaggtgcccagcatcccccaggcccatgactcctaccagtgggtctctgtgtcagaggatgctccagcctccccagtggagactcaggtctttgaggatccccgggagttcttgagccacttggaggaatacttaaagcaggtgggtggaacagaggagtactggctgtctcaaatccaaaaccacatgaatggcccagctaaaaagtggtgggaatataagcaggactctgtcaagaactgggttgagttcaagaaggagttcctgcaatacagtgaggggactctgactagggatgctatcaaaagggagctggatttgccccagaaagagggggagcccctggaccagttcctttggcgcaagagagacttgtaccagaccctctatgttgatgcagatgaggaggaaattatccagtatgtggtaggcaccctccagcccaaactgaagcgcttcttgagttaccccttgcccaagaccttagagcagctgatccaaagagggaaggaagtccaaggcaacatggaccactctgaggagcctagcccacagaggacccctgaaattcagtcaggagattctgtggacagcgtgcctccctcaaccactgccagccctgtgccgagcaatgggactcaaccggagccccctagcccaccagctactgtcatatgagctagtccaagggatgcagcggtctgggttacatgaaagggagaagggggcatatttaggaagcttctccttggagagaggttctggctgagacgaga

SEQ ID NO: 57 - DNA, 6270 bp, Cygnus olor
gcagttcaggcagggaagagaagcagctccttgcatctctagtgaaagcgcttttgactcgccaagtttaccggagaagaaatcatcaggatttctttttttttttttctttctttcttctgcggcagcttccagcctctgtgtgcatcgctgtgtgtttcaaccgagcggggactcttcatcgttcgagattctcagctccggacgagcaggtagcaggcacgcgtttggggctggacatcttagccaactcctttcctcattcctggaggatcctggctctctctgggacaccctgagcacgtgagacaggcgtttccagcagggcactgggagaaatttgcctacaactctctctgagatccacggggaccgagcagctcactctgcggtgatatctgatttggttgtgtttgtgtcgaaaagtcctttgacgggggtttagaagtgtctgtgtgtcttttgggaagtgttgcagtgggggttttgagagcaggctttagtgccggggcttacaacccagtttcttctgtgtttgacacttgtacggtaggagccatgcagctggataatgtcaccaacgcgggcatccactccttccaggggcaccgtggagtggccaacaagcccaatgtgatcctacagatagggaaatgcagggcggaaatgttggagcatgtcaggaggacccaccggcacctcctgtctgaggtctccaagcaggtggagcgcgagctgaagggcttgcagaaatcggtggggaagttagagaacaacttagaggaccacgtcccgaccgataatcagagatggaagaagtccatcaaggcctgcctggccaggtgccaggagaccatcgcccatctggagagatgggtcaagagagagatgaatgtttggaaggaggtctttttccgtctggagaagtgggcagaccgcctggagtccatggggggcaaatattgccctggggaacacggcaagcagactgtgtccgttggggtgggaggcccagagataaggccaagcgagggggagatttatgactatgcccttgatatgagccaaatgtatgctctgacccctcctcctggggaggtgcccagcatcccccaggcccatgattcctaccagtgggtctccgtgtcggaggatgctccagcctccccagtggagacccaggtctttgaggatccccgggagtttttgagccacttggaggaatacttaaagcaggtgggtgggacagaggagtactggctctctcagatccagaaccacatgaacggcccagctaaaaagtggtgggaatacaaacaggactctgtcaagaactgggttgagttcaagaaggagttcctgcagtacagcgaggggactctgactagggatgctatcaaaagggagctggatctaccccagaaagagggcgagcccctggaccagttcctctggcgcaagagagacttgtaccagaccctgtatgttgatgctgatgaggaggagattatccagtacgtggtaggcaccctccagcccaaactgaagcgcttcttgagttaccccttgcccaagaccttagagcagctgatccaaagagggaaggaagtccaaggcaacatggaccactccgacgagcctagcccacagaggacccccgaaattcagtcaggggactctgttgagagcatgcctccctcaaccaccgccagccccgtgcccagcaatgggacacaacccgagccccctagccctccagctactgtcatatgagctagtccaacagagatggcaatctgggttacgtgaatgggagaagggggcgtatttaggaaacttctccttggagagaggttccggctgagccgcgacacgaggtgtgctcagtccaacagcccatagcaaaggaattaactttgcttgtggggggagggaggcgaagggggagaggcaaccttaggatgtggttgcacacctcacccgagccacgccatacggtggtgccggggatgctgcttgcaccactgtgggggacggacaattttataagacccatgacaagaaaccagagacaattcccaacttcagaagcagccgcttggcactggcggctttcaaggacttctgacgagtgcagctattggctgagggttcctacccatctggatctctcctccttcccccctccctctcgtgaagaggttctgagaggacatctttcttttgaccctcacccatttctaatttaccgctgggcttctgtttacttggcaatctcctgttctgtcttgctttaaaggataaaagattttatttatttatttattttgtttaattaagaggaaatcctatgacttcaggaaatgaaaaccttaagaatctgggcaatgtttagtgcttttaatttcagtgcacccaatacctgctttaatgtttttcctcccaagaggctggtttactccttatcttagtttctgctcactccaatcaaagctactgcagtgcagtagcaaatttcaccctttctctgtgcattacactgtgcattcagcagtaaacagagtttcaaattaaattctgggttattttattgaagggagaacctgtctcctttcagagaagggagggtgtcaaggtggagaaagcaaacaacagagctattttgagagggtggtggggggggggagttagaggaaacaaatccttatacattgaatgaaacaaacaaacacagccaaaattcagagcaaaatatccccagagcagcaaatcgtgtccatgctgatgtgtggagacaacaggaacttttgccatataaaagcaaatcaaagtgaagagaagagctgtgtgtcccagcacagcctcagcctgtgtatcaggaagaagaatttctgctttcacagacagactcaaatgctcttggaaagcctggcacctctgtcatctgaggacaaagagttgcctgttcacatagaactttctacaacagcccctttgccatggatggagatggacttggactcggtgacattttccatggtgagacagcaatgctcagcattcaccttgctttgaccaaggcctgatggtaggacattgagaagaaattgctgtaagatgcaggaagtttggctcttcaaaacctcttgaggctggacacatcttgagcatcatctgcattcaccaccagaccaaataagcaacacctctgcaagatgtacagcagggatgcagagacaggagtgtccctgggatgtccccggcaccacaacagcagcgatgtgtgaccccggcggcttagaaggcctttggcatacctccttccaagaggctgaaggtaagacaactttctgacgttgtcctctctgcactcctcaggcctaaattagtcttagcctgtccagcgggatccttgcagtgggatacttgggacaggagcattgtaagtggcagactagggcatggaggaaaaaagggagggacaaccaaagggaaataaaatacagtgaataggaaaattttccaaacaggacagtatcttacactttctaattactatagggaaggaatgggaaggaactggcccatgaagccatgggcttgagtgcccagcagtgacaacacatcacggggctattcacagcccagaggagatgaacctctgttccgcatccttgcctagaagtgagtcagtgtcaggaggagtgagggctctcccctcactttttcagagtgagttagcttgcagtggctgtgtctgcagaaagaagggagcagttctcacgaatgacctgggaatgagtggtggaggagtgggtgtcagtgctgaggatgagctggccctgcattacaaacattatcttctcttgattacagtgactcactcagagcctcctctgagaagaaatcacttcatggtgctcaggactcggaaggaaagccaaagagaaaagatttcaaaaccaaggattcaacatgggacctgctgccaggatccccagctgccaagtgccagatcccctgcctgaatgaaggcctggcacaggtaattacctcccatcttacccctgagagcctttcttagcctccccagtgtcctcaggcaagatatgggatagcccaggtgcaaatatctgggctggtcttgggacctcagacccgatggctacaaggggctggcacaatcagataggtgggatttcagcttaatgtgggaacacaagcaccagccccagtgattagtgttctggggacagagactgtcctgccttcctttctgctggacctctggcaatccttagacaccactgcctagcgggacctccaggcccaggcacatggtgggcacaccagctgaatattaacctatatccagaaaaatccccagtattctctgtagaacttctttggagaccttggaaatctaacttgagttgctccattttttttttttttttctaacagagactcctgctgctgttgctgagtttcctcctctgtgcccaagacacctgctttcccaagtgagaagcaagtgctgctgaaagacaagagggcaaaatatgcaccaaagagccaaccatgccgtgcaatgttgtattcaagatgctgagagccggaatgaaagtgggagccatttccaacagggtgaggaaaaggctgagctggtccaactagtccaacaacagaagaaagtgatgagaatgaagagagaaaccaagagaaaagataaaccaagagaaccgggtctgggctttggggacagcaaggatgctggacttgtaccgactgtctgttgagatgatgccatacctctgcagtttggggccactgggactcacctaaagaaatcttcactagattatcagattaaaacaaaaacactttcctgattaactttgcaaagtgactgaccctccctaggctacaaaccctccacgctgttaaggctgtaactcatttttcctgagtcgagggtcgcttcatttcatgcgggtatcagttttcaaacctcaaacagctctggaggttcggagaagcatcctggggtccagatgcttgtctgaactacctgagcctgcacaactgggccagctgtcttgccaaaagggacacttgtgagacagcaggagcttcctggatctgcatgggctacagttactgcaagaagcggtgctcttgtggtggctttagcgtgactgcttccatacagacccagggagcacaaaaggtgcatgagagacaacagcttgagtgagttgaaccaagcctttttgcaagacagctttggttcacatctcatttgaagggatcccgttggttcctctctcttccagagccaagggtcccgggtatgcgtgtgcgcgtcagtgcgggtgtgcatgtgtcgagtgatcagatccacctaaccaaattctgtggagttttgttgaatttgaaccaagccaacgggacgtcatgcacattccaacattgctcagccaaaaatgtccaggaccagaaaattatgtgaaactatgttaaagcagacttcataggtatcatcccaaggtcaaaatgaagtttgattttgaggtgcttaatttccacagtccctctcaagggacctgactgcctcaatgggtattttcaatgtccatagactttcctgccttttctatgagttatcctgcctgaactacttgattatatggccctgagctttgtacattttccactgactttgtggagtgtgcacaactgaacgcccttggctggttttatttcagttattgctcctagctgattggagctttacttgtagcaccctggtttatattaccagcttctccaggaaggactggtagtttgttttcctggggtagagtcacgtgaatgaagtgtgtatgtgctgtgtctgtgaaactttagcagatttcaaccactggagattttttttttccttaggtaattttacatttgactctgacaaaactactttagagtttttatttttactagaaatattagtaattcaaacaaccttgtacaaaaggcaaactcattgaatcactacaggttataggggttgaagccaaaaggtctttgtaagccgacatcacttgctctagatctgactgtatcaggcagttattcctcatgtgtcatgttggagttacaagatcacaccaagccactagaacctgtcaatagaatagtgctacactttatttgctattgtagcaaagccttttgtagatttatacaataaaactttgaaatatctgcttc

SEQ ID NO: 58 - DNA, 3440 bp, Puma yagouaroundi
gccgctctccgccgctctccctgcgctgcccgcgctccccgccgctctccctgcgctccgccgcgcccgcgccggggacaccgaggacccggctccaccgcgccgccggcccaggggcccttcgcagcccgccgcctcccgcccgtccgagcgccgcggccacctgctcactccctccgatggagctggaccacatgaagagcggcggcctccacgcctaccccgggccgcggggcgggccggccgccaagcccaacgtgatcctgcagatcggtaagtgccgggccgagatgctggagcacgtgcggaggacccaccggcacctgctgaccgaggtgtccaagcaggtggagcgggagctgaaggggctgcacaggtcggtgggtaagctggagagcaacctggacggctacgtgcccaccggcgactcgcagcgctggaagaagtccatcaaggcctgcctgtgccgctgccaggagaccatcgccaacctggagcgctgggtcaagcgcgagatgcacgtgtggcgggaggtcttctaccggctggagaggtgggccgaccgcctggagtccatgggcggcaagtaccccgtgggcggcgagccggcccgccacaccgtgtccgtgggcgtcgggggtcccgagggctactgccacgacgccgatgggtacgactacacggtcagcccctacgccatcaccccgccccccgccgccggcgagctgcccgggcaggagcccgccgaggcccagcagtacccgccctgggcgcccggcgaggacgggcagcccgggcccggcgtggacacgcagatcttcgaggacccgagggagttcctcagccacctggaggagtacctgcggcaggtgggcggctccgaggagtactggctgtcccaaatccagaaccacatgaacgggccggccaagaagtggtgggagttcaagcagggctccgtgaagaactgggtggagttcaagaaggaattcctgcagtacagcgagggcacgctgtcccgcgaggccatccagcgcgagctggacctgccgcagaaacagggggagccgctggaccagttcctgtggcgcaagcgggacctgtaccagacgctgtacgtggacgccgaggaggaggagatcatccagtacgtggtgggcaccctgcagcccaagctgaagcgcttcctgcggcacccgctgcccaagaccctggagcagctcatccagaggggcaaggaggtgcaggatggcctggaccaggcctccgagcccgccggcccccagctgcccgccgaggaggaggccgaggccctcacgccggccctcaccagcgagtctgtggccagcgaccggacccagcccgaatagagggcggcccaggccgcagcccgcccgccaccccccgcccgtggcctttgccaaccaggactgtccgagccgggccgagccccgtgcgggggagccctcgtcccccgcccgctgggcaccccacctccgcctcccggccggactcgcacaaacacgcgtcacccagacgtggacactcgcccccccccccccccgccggcaagggggcccccccccccgcccccgtcctgcggggcccctgcctcgtcacctgcctttctcctgtctgtctttcccggcccccatccgcaccctgcacactctcaggccgtgacccgacttccaggctcccttattccgcccgccgcctgggccctccgggcattcagaggtcaagtgtccgggcggcacaggccagtgcgcaccaagctcgagggacaccctggaacagacgcgaagacagaccggtgccgccggaaccctggcttctggcaatcgctgcgcggccggctggcactcgcgtcaccgcctcgggcagctggccagcctcgggccacgaggcccctcctcctggaggacactgaagcgtaagacgcagcagcagcagcagcagcagcagacctggcgtcctggtgcctcctggcccctcaggtgagcccctgccccacggcaccaccccggggggggggggggggggcgctgtagagtagggaggacccagggcccgtccattttccggatgagcccactgaggctcagaggcatccccagcgagttagctgcaggggtggggtgttggggggccgcagcgcagagcggtggggaaggagcagagaccccagggatcggggaggagggctgggggagtgctgagccagctctcacacgacccgacccggtgctttctcctcagcatcagtgattcacaccagcctggaaaaggatcggctgggctcgatgactcacccacggcgggcggagggtcccacagggccccgagtcctcacactcagctgaggagccgggagactgacgacaggtaaggggccccatctctcccaccgagaccctatccctcggctgtccttcccggggccccaggcccggcggcccccagcggcgctctgggcaagccgggggccgccccataacatccacccacacccttcctgcggagctcctcccagcctctggcctgtccctgggccggcccgggcgcccccgcccccgtgtctttctttcaggtcccaaggctcccacagagtctttgctgcttgcctcgcacttccctccctctcctcctgcaagctgcctgcacacgaggagacgttgaggtcggcgagaggggctgcagagaggacaggcccggcggaaagctggaggtgaagacgggccagcgtgagggccagggcctgccgccaggcctgccccgctggccaccagccctcccgcccccaggtccgctgcggctggagtcggggtcggccaccttgggccctgcctcgctccagcccaggaacccccggccacggcacggcggccgtcctctcctaccagagctttccgggagctctgacgccgaggccacagcccctgctcccgcccgcagccccaggcccgcagccccagcagtgcccagaagcctttgcccctggggcttaagcgggctctctgccaggccccgccattgccagggtccggacccccacctctccaaacaccagcaccccggtgcagactggccactcaggtctgtagccccagcaggccctggctgggggtcctcctttccacctgtccagtgggggttcccaggttcagaagactggtgtctgcagaagattctgtcaaccccgacatcatgcactcctgccagcacccccagattttatttttgcacataagccataacccacactcacaagctggcacgggctgcagggaggccccagggtcctcaagagggtgtggccagccctccctgtccccagtggatcaggccttgatgtcaggccaagctgtgtgcagccccctgtcaccttccctgaagacagactttttaagtttttgttaataaaacactgaaacttc

SEQ ID NO: 59 - DNA, 2191 bp, Bufo bufo
ctcagatgcaagcagatagaagtcgttttctctcttctcttgcaatcacaccgactttcgaggatcattacttgctaaatacttagctttgctttcaacattttatccttttctccagttgttggaagaggtttctcaacgttgacgattgggacaaggcatcttctaatcatcaccttcattccagtcatcttggaagatatttggaaatcttcccactgcagaacttctgaaaggactggacactgggtgatatctaattaccatctctcctatatctgttaaacttttcaaaaaaattgcattgctttactgaactgagaatttgactttcttgtatgttactgccagaattgtagattgtttactgagttgtatgaaagtgctcttaaccaaacagcatagagagaaaggttgcatgcaggtttgccacctgggaaaaccatttcttgccgactatctcattaacgataacttttttcatattacatttttatatttttgaattgtgaacccaataatacttttacaattcatatttgataaattgtagctaattgtatccaattgtgaccatggcggcaagcatggctcttagtggcatcggagcacccgctctctctgtgcctgaaaaaactgtggctcttcagattggtacttgtagtccagcagaaatgttggacagagtcagaaagacacaagtgtatattctttctggggtctctagacaggttgagaatgagctgaaagggttcaagaggtcagtacagaggttaaattctaacatgcattatgattcctcagttgttgggattcagaggtggaaacgttccatcaagtcttgtttgttgagatgtcaagatactttagtcaacttagagaggtggatgaagagggagatgaactcttggaggggtgttttctcccgttttgaaaaaatggttagcaaagctgatcaaaacttgtgtaggacatgtaagatggaagagaagcacaggtggtctttctatggagaaaaaagtgagaaagaaaaagaggccgatgccaatcaggagattgttgatccttatgcccccagcccaccatcttctccacctccacctccaccaccactaccagcacaatcttgccacccacatcactgggttgtcatctcagttgatatcctttctcctcctgagtttgatgctggaatgtcagaagatcctcgtgagtttttagtgaacctagagaagttctttaagcgtagtgggtggaatgaaaaagtttggctatctcaagtagacaaccacttgaaaggggcagccaagaagtggtgggaatataggcaggagacagtagaaagttggcatgacttcaaagttgccttcttgcaatactgtgaaaggatagttgttagagaagcaatcaagagggacttagatcttcctcaaagacgttgggaacctctagagcaatttgtgtggaagaaaagagccttgtaccatagactctatgttgatgctaatgaggaggacatgatccgttacattattagtacgctacacccagagatcaagcgcttcctcaaatcccccctccccaagactatggatcagctagtgcaaatggggaaggaaatccagtttgattttgagcagtcagagaagcaaacccttaaggcagcttactcagatgagcaaattagcaccaagttgaatgtcattgtcaccaaggatccttatgatagcaatagcatagtcactgagaaatcaagctacatagaaggatattaagcaggaaactttggttatttgaagagaaattaatgctcttgaatgaaaactttttagactttcaaggtaaaagtcaatttagactcggcacttgagggaaagttgtaggttttctgtaaggtgttgctagaaagtcaaggcataaggtgaatttgaaaacgagattttctcctcatagatacaagaaattataggagatctaagcaactcaaacgcaaatacaatacacaatgtataggttttctcatgggaacaggacatattgcccttcatgtagctaggacttaagcagtaattgctttctatgaccacatagagtaaatggaaccatggaaaagttagtgaattgtcaccagaatctggtgtcacaacttttgtggtgcaaataaacaaagcaaaaaatacaatatcagtaa

SEQ ID NO: 60 - DNA, 2933 bp, Rana temporaria
tcggattccagacggaacttcttctgatccagcccttggacataagggtttttcatcatcttcttcttcttcttcttcttcttcttgttcttcttcatcactcttaagattttgggatctcctaattgcttctgattcctgaaaattgcatcggaagttctgaaaagactggactttgggtgatatccaactgcagccttttaaattccctctttttttctttttcttgctaaaatctgacagccgtgatttgtaattcaaattttttctgcttactgaatagatctagggattgtttactgatttgggaaaatgctcttagcttaacggaacgaggtgggttgcaagagcctggctgcctgacgagagcaagcaattttctttttttaaagtttgttgctttaaaaaaaaaaaaagttttcaaaactttaaagataaaccaaggcatttgctggctacattttttaacttgctcgttaaaaatggcagcaagcctagctctcagtggcgttgtggctcccgctctccctcttcccgaacaaacggttgctctccagattggcacttgtagcccagctgaaatgctggacagggttaggaagacgcaggtttacattctgtccggggtctccaggcaagtcgaaagcgagctgaaagggtttaagaggtctgtgcagaggctgaatgccaacatgaatgatcagtccccgttggtgggaatccagaggtggaagcgatcgataaaggcttgccttatgagatgccaggataccttggtcaacttagagaggtggatgaagagagagatgaactcttggaggggggtgttttcccgatttgaaaaaatggtaggcaaggaagagctgcaaaggaggtctttttacggagagaaaagtgcgaaggaaaaggaggcagaggcggctcaaatagctcaggaagttcttgataacccaaatccttatgctcctaccccaccatgctctcctccacccccagcattgccatcccagtcatgccagcagcaccactgggttgtcctttccgttgacctcctctccccccctgagtttgatgcaaacatgtctgaggatcctcgggatttcctagtgaacttagaaaagtattttaagcgcagcgggtggcacgagaaaatttggctgtctcaggtagacaaccacttaaagggggcagctaagaagtggtgggaattcaggcaggagaccatagacaactggcacgacttcaaagtgtctttcttgcaatactgcgaacgtttagtggtgagagaggccatcaagagagacctagaccttccccagaggcgttgggagcccttagagcagtttgtgtggaagaaaagagccctctaccaccggctctatgtcgatgccaacgaggaagacatgatccgatttatcattagcacccttcacccagagatcaggcgtttcctcaaaccccctttccctaagaccatggaccagctagtgcagatgggcaaggaaatccaatttgaatttgagcagtcggagaagcaaacccttaaggccgcttattccgacgagcagattagcaccaaacttaacgtcctcgtcacgaaggatccttacgatagcaatagcgtctgcactgagaaagctagctacgagtaggaaagtttttaaggaacaaacttttgttgctctctggtgagaaaatatcagctcttgaaaatgaaagagtgaagtttagcttagagaactttacggtaatctttcttgagtcctgtacaatgcaacaggtagaaaggtgagggcttgtgtctggtatgggaagtcaaggtcagctgtgacatcttttcaggttgtcacagaaaaacgacatttttagtgctgacaatagcaggcaagtcttaatggcagttcaataacgtaataacttctgattttctttatacatcataatgctataatcaactccaaactagagatatacaatgcttagatctttaataatacacaactaggacatattgccctgcatgtagccaggaagtaagcagtttattgctgtattagtggccacttccagtaaatgggaattttggacaaaaaattcgctgaactgtcaccagaatctggtgtcgcagttttgaagcgattgtcgctgaaaacgttccattaatgccgattgtctcgcaacgatttggcagatgaacccatttactataagtggggggctgttttcacagtgttctgcctgttccctttaaatttcagggaataacggcattcatggggaagttaaccatttgttcggttttaagagcatattttttttttattattattgctgaatatgtaaaataagttgaaaaaaaaaatagaaatatttttgatatttttcaatgtacagaaatctcatctatattgtttagtgcaatatcatttgtatatattagaagaacaattccttcgaataattcgattttattaatcggggcaataacatttcatatattgtgaaagaccaatgtgttcactttttgaatactatagacatttttttttgtggtcttaattatgaaatgaatgttgttgtttttttttggggggggtctctctatatgaacactcagtagcacttttaaatcggcttgtcagattacaaatggacaataggcatgaggactaggactttatgcaaagtttttaccatggactctagaaatctgattaagcattaatattagatggacaatttcaactttttcacaaccatctacttgggagccaaccagttcctttgaggaatctagaatgtttcaccctacctacaaaagaagagactgtatgaccaggacccaatgttcttggccgtgtcaaccacattgcctacaaaagaagagactgcatgaccaggacccaatgttcttggccgtgtcaaccaccttg

SEQ ID NO: 61 - DNA, 3387 bp, Oryx dammah
cgggcgctgagtcctcctgctccgtccccgctaccgccgccgccgccgcgaccaaccgggaccggccgctcccccgcgggacccgcccgccgcgcctcgcagctccgcgcagctagcccccagtagcccctcgccgtccccaagaggactttgcagcctccctctcccgcctattcgagcgagccccgccgcaacctgcgagccgatggagttggaccacaggacgaccggcggcctccacgcctaccccgggccccgcggcgggccggccgccaagcccaacgtgatcttgcagatcggtaagtgccgggcggagatgctggagcacgtgcggaggacccaccggcacctgctcgctgaagtgtccaagcaggtggagcgggagctgaaggggctgcaccggtccgtgggcaagctggagagcaacctggacgggtacgtgcccaccggcgactcgcagcgctggaagaagtccatcaaggcctgcctgagccgctgccaggagaccatcgccaacctggagcgctgggtcaagcgggagatgcacgtgtggcgggaggtcttctaccggctggagaggtgggccgaccgcctggagtctgggggtggcaagtacccggtgggcagcgacccagcacgccacaccgtctccgtgggcgtcgggggtcccgagagctactgccaggaggcggacaactacgactacactgtcagtccctatgccatcacccccccaccggccactggccagctgcccgggcaggaggaagtggaggcccagcagtacccgccctgggagccgggagaggacgggcagctgagccccggggtggacacgcaggtctttgaggacccgcgggagttcctcagccacctggaggactacctgcgccaggtgggcggctccgaggagtactggctgtctcagatccagaaccacatgaacgggccggccaagaaatggtgggagttcaagcagggctcggtgaagaactgggtggagttcaagaaggagttcctgcagtacagcgagggcacgctgtcccgggaggccatccagcgggagctggacctgccgcagaagcagggcgagccactggaccagtttctgtggcgcaagcgggacctgtaccagacgctgtatgtggacgccgaggaggaggagatcatccagtacgtggtgggcaccctgcagcccaagctcaagcgtttcctaaggcccccgctgcccaagaccctggagcagctcatccagaagggcatggaggtgcaggacggcctggagcgggcagccgagcccaccggcccccacccgcctgctgaggaagaggccgaggccctcacacctgccctcaccaacgagtccgtagccagcgaccggactcaacccgagtagagggtgccaggccccgcctgcccgcccgtggccctcgcccactgaaactttagagtgggcccgcccctgcaggggagcccttagtctcctcgtgcagctggacactcacctcagcctcctagcctgactccaacagacacaggtgacccagatgcgggcagtgtcccccagacagccaaggggctccccttcctcgcagacccagccttcaccctccctgcgtctgtcttccccagtggtggactggcctgagtcagcaatcccgccctccatgctcttaggccatgacagtttcctcatcctgctcaatgcctgggccctctgggcactcagaaactcagtgtccagatggcacgggccggtgtgcacccagctcaaggaacaccccagagcagaagcttaggggccaccagtgcccccggagcctgggcttcagggaagctacttctcctggcagtcgccgtgagtggctggcacccctgctgcctcccggggcagctggccagccttgggcagtgtggctccctccccctggaggagagcccaagctcaagacacagcagcagcagcagcagcagccgccgccgccgcagtggcagcaacagacctggcgacccggtgcctcctggcccctcaggtgagcccctgccccttggcaccaccgccagggggcaccatagggctgggagggccctgggcaaagcccaccccactccaggcgagcccacggaggctcagagcccctggcatccccataaatccggtgcggaggggagaccccaggggtcagggagggggctggagttgggggcagggctgggggaggtcgctgacccagctctcacagagccccgtgtgttctctccccgcagcaccagtgactcacgccagcctggggagggacagagccccgtgcaatgactcacccatggcaggcggcaggtcccctggggcccgagtcctccagcccggctgaggcagcagccggcctctggagccaggagagtgatgacaggtacacaggggacctcacccccagctgtcctcaccaggggcccccaagctccccccagcccctggccccaggcccccagtcctctgggccagctgagaaacagcctcccaggaccccaagggctggctctctgagagggcagccctgccccaccccaccctgccctggcggtccccgagtccctgaccacctgtgtcttcttcctttcaggtctccaggctcccgcggagcctttgctgctgtgcccggcactgtcccttctcctctccccctacaagctgcctgcacgagaggagaagcctaaaaccagaggagggggcccaacagagagctggtggtgaagagaggccagcgcgagggccagggcctgccgctatgcccgccccgctggctgcccactgcccgccgcccccagggccgccgccctcccgggcctggcgtggctcccaccctggagcccctgcccgctgtgcggccatcctctgccaccagagcttccgccacggccgcccctgcccggtggccccaggcccagccccaggaggcccagaagcctttgcccctggggctcactcaggctccctgccaggccctgctgcggcctggcccagacccccactgccccagccaccaacaccctggtgctgaccggccacctgtgtctgcagcccaagcaggcctggttgggggctcccaaactcaggagaccagctcccgcaggaaattctgccggcccctctgtcctgcgtcatgccagcgccgccccctgccccagattttatttttgcatataagccataacctgctctcctggcgcaggctacggggaggccccaaggtcctcaggggggtgtggtcaagtccccgcccaccgtggatcaagcctcgaatgtcaggccaggctatgtccaccctgccacctcacctgaagacagacgctttttctaagactttgttaataaaacattgaaactta

SEQ ID NO: 62 - DNA, 6056 bp, Hirundo rustica
acagggaggagaagcagctcttcgcatctccagtgaaagcggttttttgattcaccaagttcgcccgaggagaaatcacccggattttttgctgcagcttccggcttctttgtgcatctctgtgtgattttctccggcggggactccgcggcgttccagattcccggcggggttggacgtcttatccagctcctctccttgttcctggaggatcctggttctctctgggacacccctgagcacgtgagaccggcgcttccagcttggcaccgggaggaatttgcctacaactctctctgggatccacgtggaccgaccagctcgctctgcggtgatatctgattgggttgtgtttgtgtccaaaagtccttggaggggggtttagaagtctctgtgtgtctttcaggaagtgttgtggtgggagtttttgggacccagctttagtgccggggcttataacccacttctttccgtgtttgccactcgcacggtcggagccatgcagctggacaatgtcaccagcgcgggcgtccactccttccaggggcaccgtggagttgccaacaagcccaatgtgatcctgcagataggcaagtgcagggcagaaatgctggagcatgtccagaggacccaccggcacctcctgacagaggtgtccaagcaggtggagcgggagctgaaggggttgcagaaatccgtggggaagttggagaacaacttagaggaccacgtcccaaccgaaaaccagagatggaagaagtccatcaaggcctgcctggccagatgccaggagaccattgcccacctggagaggtgggtcaagagggagatgaatgtttggaaggaggtctttttccgcctggaaaagtgggctgaccgcctggagtccatgggaggcaaatactgccctggggagcagggcaagcagacggtgtccgtcggggtgggaggcccagagataaggccaggtgagggggagatttatgattatgccctggacatgagccagatgtatgccctgacccctcctcccggggaggtgcctagcatcccccagggacacgattcctaccagtgggtctctgtgtcggaggacgctcccgcctccccagtggagacccaggtgtttgaggatccccgggagttcttgagccacttggaggaatacttaaagcaggtgggtggaacagaggagtattggctctctcagatccaaaaccacatgaacggcccagctaaaaagtggtgggagtacaagcaggactccgtcaaaaactgggtcgagttcaagaaggagttcctgcagtacagcgagggaactctgactagggatgctatcaaaagggagctggatttgccccagaaagagggggagcccctggatcagttcctttggcgcaagagagacctgtaccagaccctctatgtggatgcagacgaggaggagatcatccagtacgtggtaggcaccctccagcccaaactgaagcgtttcctgagctaccccctgcccaagaccttagagcagctgatccagagggggaaggaagtccaaggcaccgtggagcactctgaggagcccagcccacagaggacccctgaggttcagccaggagactccgtggagaccgtgcccccctcgaccaccgccagccccgtgccgagcaacgggacccaaccagagccccccagccccccagccactgtcatatgagctcccctgaggggggtctgggttctgtggaagggagaaagggggcttatttaggaagcttctccttggaggggagttctggctgagacgagacctgaggagtgctcagtccaacagcccggagcagaggggttgactttgctcgtggggggagggaggtggtgggggagaggagccccaggacggggcagcccccctcgcccaggccgtgccacgcggtggtgctggggaccctgctggcaccgctgcggggaacagccaattttatgagaattccctgacaagaaactagagacaattcccaacttgtgaagcagccgcccctggcgctggcagctctcggggacttcatgcgagcgcagcagttggtggagggttcctacccatctggacctctctttttccttctctcctccctcctctgagagggtggccctgtcattaggagacagctttcctttaacccctgccggtttttgattaacctctgggtttctgttcacttggcaatctcctgttcttacttgctccaaaggattaaaataattttttggataattttttttgttttaagaaggaaaaaaagaaaaatcctgttatttcaggaactgaaagctttaagaatctggattattttctgtggttttcatttcactgcacctaatacctgcattaatgtgttccccctcaagaggctcttactggtttacttcttgtcttagtttctgctccctccaattcaaggccactgcagtgcagaggcgaatttcatcctttctctgcacattatcctgtgcattcagcaggaaatagattttctaattaaattccgagctcatttattgaaggagcattctctttcagagaagagagggtgctcaaggtagagagagagacaccagagctcttttgagacagactggggggagggaagggagataaatccttattctttgaatgaaacaaaaaaaacacaccccaaattcagagcaaaatatccccagagcagcaaatcgagtccatgctgatgtgtggagacaacaggaactttttacctcgtaaaagccaaaagaagtgaagagaggatctgtgtgtcccagcgcagttttaacctgtgcatcgctgcaaggagtttctgctcatacagacagactccaaatgctcttggaaagcctggcacccctgtcctggagcgcctgaggactgagcgttgtccgctcacagagaaattccggcaacacctcgccgcagatggagatggacttggactttgtgacttttcccatgttgaggcaggaaatgctcagcactcacctttggccaggtgtttgatgacaggactgagagaagaaagacattcctgaagtttggctctccaaaacttcctgaggttggacacatcctgggcatcatctgcatccatcaccagaccaaacaaacagcagggatgcagcagcaggagtgaccctgggatgctcctggcactgccacagcggtggcacgtggcactggtggctcagaaggcctttgctgtgactccttccaagaggctgaaggtaaggcagctctccggcatcctctcctcagagctaaactggtcggagaatggccaggaggaaccttgccctgggataaaaactcagcctgaaatgggatatgaagcattggggttgggaaaaaggggaagggagagccaggaaatacaggaatgggaaaagcttccaaagagggcagtatcctgcactttttgattaatatggggaaaagaatggggagcttcttaattagcccagccccaggaccttgtccttcatggagaagctctgggcttgagtccccacctgaggcagcacatttcaggttcatgcacagcccaaaggagctgcagttctgctctgcctccttgctgggagctggtctcaggaatggtgggagctctcctctcccttgttcccagtttgtcaacagctctgcgtgcagagaaaggagcgtttctcactgatgacctgggctgagtgatgggggagtgggagtcactgctgaggatgagctggccgtgtattacaagctttgtctcctcttgcttccagtgactcactcagatcctcctctgagaaggaatcacttcgcagcatgcagcatttgtgaggaaagccacagaaaaaaagctgcaaaacaaaggcctcaacatcagacctgctctcaggaccctcagccgccaactgccacatccaccacctgaaggaaagactggcacaggtaattacatcccatatttccctgtgggccttccttaatctccccggtgccctgacctgagatattgaagagcccaggtgcaaacccagctggtcttgaaacctcagtcccagcctggcaccaccagagaggtgggatttcagcctcttggtgtcagtgcccaagcaccagccccagtaattgatgctccagggactgcacattgtggctttcccttggctggaccatgcgcaaatccttagaccccagcacctggtggatcctccaggctgcaggcactgcaaaatttgatctcaactcatgagaattcatcctttctctccactctaaaaatctaatcagagttggtgcatttattttttcttttccagcgatccctgctgctgttgctgagattccttctctgtgtccaagagctttcccaggggagaagaaagtgctgcaggaagacagagggcaaatcacgcaccagagagcctcccatgcagtgcaatgccatgctcaaggtgctgagagccagaatgaaaccgggacgctgcttccaacaggacaaggaacagcctgagctggtccaggtactccaagcacagaagaaagcgctgagaatggaaagagaggccggaacagaggaaccaagtccaggctttggggacagcggggatgctgggcttgtgctggctgtctgtggagaggattccgtgcctctgtgatgccgggactcacctaaagaaatcctcactgaaagaaactctcctgattaactttgccaaggggctgatcctgccttggctacgaaccctccccgctggccgtgccgtaactcacctctcctgagcccagggtagcttcatttcatgcgggtatcagttccaaacctcaaagggctcctggagtttggagaagcatcccacggtccagatgcttgtctgaactgttggagcctgcacgtctgggccagctgtcttgccagcgaggagccttgtgagacagcaggcgctctctgggtctgcatgggccagagttactgcaagaactgtttccatccagacccagggagaccaaaaaagagctcgagtgagctggacaagacagttctggttcatccctcagccgaaggggtccagttggctcctctctcttccagagccaactgtcctctgtgtgtgtgtgtcagtgtggggtgtgtgtgtgttgagcaaaaaaaaaaaaacaacaaaacccacattacttaaattctgtggtgttttgttgcatttgaattaagccagagggacataaggtgcattccagcaaggctcagcaaaaatgtccaggactggaaaattccatgaaaccgtgtaaaggcagattcccgggcatcatcttaaggtctaaatgatatttgattttgaggtgcttaatttccacagtctcttccaatggactagactgcctcaatgggcaattttatttttcctgcttttttagggaattagcctgtcttgtgctacttggtcatttggtcctgaggtttttacattttcagctggctttttggagtgcgcagaactgaatctcctgggctgactggatttcaatggttgctcccagcaaactggagctttacttgtagcaccctggtttttattaccagcctctccctggaggactggtagtttatttttctggggcagaggcacatgaatgagaagcgtggatgtgttgtacctctggaactttagcagatttcaaccactgcatatttttttcctccctaggtaattttacatttactgatgaaactactttagagcttttatttttactagagataatattaattccaacaaccttgtgcaaaaggcaaacacgttgagtcgctgcaggttgtaggggttgaagccaaaaggtctttgtaagccaacatcacctacctgccctggatccggctggatcaggcagtttattcctcatgcgtcatgttggagttacgagatcacaccgagccactagagcctgtcagtagaatagtgctatactcgatttgctattgtagcaaagcctttttgtagatttatacaataaaactttgaaataatctgct

SEQ ID NO: 63 - DNA, 3330 bp, Pteropus giganteus
ttcccactccggctccggagctgccaccgccactgccgctgccgccgccgccgccgccggacgcactgccgcacggaccccgcagcccttgccggccccaagagaactctgcagttcgcgcctcctgcctgtccaagcaccgcggccacctgcgcacagatggagctggaccacatgacgagcggcggcctccacacctaccctgggccccggggcgggccggcggccaagcccaacgtgatcctgcagatcggtaagtgcagggctgagatgctggagcacgtgaggaggacccaccggcacctgctgactgaggtgtccaagcaggtggagcgggagctgaaggggctgcacaggtcagtgggcaagctggagagcaacctggacggctacgtgcccaccagcgactcgcagcgctggaggaagtccatcaaggcctgcctgagccgctgccaggagaccatcgccaacctggagcgctgggtcaagcgcgagatgcacgtgtggagggaggtcttctaccgcctggagaggtgggctgaccgcctggagtccatgggcggcaagtacccggtgggcagtgagccggcccgccacaccgtctccgtgggagtcgggggtcctgagggctacagccacgaggccgatggctacgactacaccgtcagcccctacgccattaccccgccgcctgccgctggcgagctgcccgggcaggagcctgaggaggcccagcagtacacgccctgggtgccgggcgaggacgggcagccgagccctggcgtggacacgcagatcttcgaggacccgcgagagttcctcagccacctggaggagtacctgcggcaggtgggtggctccgaggagtactggctgtcgcagatccagaaccacatgaacgggccggccaagaagtggtgggagttcaagcaaggctcggtgaggaactgggtggagttcaagaaggcgttcctgcagtacagcgagggcacgctgtcccgcgaggccatccagcgcgagctggacctgccgcagaagcagggcgagccgctggaccagttcctgtggcgcaagcgggacctgtaccagacgctgcacgtggacgccgaggaggaggaggtcatccagtacgtggtgggcaccctgcagcccaagctcaagcgcttcctgcgtcacccgctgcccaagacgctggagcagctcatccagaggggcatggaggtgcaggacgacctggagcaggggcccgagccagccagccccctccgcgccgccgaggacgaggccgaggccgaggccctgacgccggccctcaccaacgagtccgtggccagcgaccggacccagcccgaatagagggcagcccgggcgcccgcctccccgccacagcccacctgtggcctttgcccattgggactttggagctggactgagtcgtgcagtgggcggcctcgttctcgtccagttggaacccctcagcctcccagcccgattcacacagacacgcgtcgtccagtcacgggcagggtgccccaaacagcacaggaacccctctcccctgccagaccctgccctgtcaccctccgtctgtcttccggggctctgggcctgcctgggccactcccccttccccccacaccccacacacactcaggccatgacaggagcccagcctcctcatcctgctcagcgctcgggccctctgggcactcaaaaaccgagtgtctgggtggcattggccagcgggcaccaagctcaggggacaccccagagccgaagccaaggcagaaccagtgccctgggaacctcagcttcgggccgcggcctggccccggccgtcgccgtgcagggtgctggcccgcctcgggcagcgtggctccctgtcccagaggacgaccgaagctgagacgcagcagcggcagcagcagacctggcggcccgtgcctcctggcccctcaggtgagcgcccgcatcatggcagcaccgatagggggcgccgtagagctcagcagtcccagggccacgtccgcgttccaggccagccccccaaagctcagagggcaccccagccagttagcacagggctgggctgggccggcatcgtggggagcagggctgggggcttgctgagctggctctcacaggcctgtgtgtgctctcacgcagaaacgtcggtgattcatgccagcctggagaaggcttgaactcggcttggtgactcaccagtggcaggtggagggtcccacggggccgagtcctccaaccggctgaggcagcagccggtgtccatggagccaggagagagacagcaggtaatggagccccgtccccccacccccccagagaccccgaccctcagccgcgctggccaggggcctgtgagtgcctccccggcctgggcgcaggcccctgccccactgctccgggcaggctgggctctcagcccgtttggtgccccctgcccttcctggaggccgccccaggcccctgcctcgtccctgactgtcctgcatcttccctttcaggtctcgaggctcccaccgaacgctgctgctacgcccggcactgcccgcccccctctccccctgcaagctgcctgcacaggagccgcaggccagccagagagggggctgtggagaggaggggccgggcggagagctgctggtgaaaagggccagcgcgagggccagggcctgccactatgcccgccccgctggccgccagcctgcccgcccctagggccaatgtggctggagtcggggtctgtgacctcgggccccaccgtgctccagcctgggcccccccgccccctgcgcaaccatcctctcctgcctgagctttccgagagccggggtatgaggccgccgcccctgcccggtggcctcccccagccccaggagatcgaagcctctgttcctggggctcaggctggctctctgccaggcccactgggcctgacccagacccccacctccctggctccaacactctggtgccggtccgacactcgtgtctgcagctagagcgggccctgtttgggatcccctttcttgcctggccactgagggttcccagatttgggggaccgatgtctacaggggatgctgccagcccttccacactgtgcccctgccgctccccccaaattttatttttgcacataagccataacccaaactcacaggctggcacaggctgcagggaggccctgcgtccccggccccccacagacccagcctcgagtgtcgggccaggccaggcagccccgccaccttccctgaagacagacgcttttgtaagattttgttaataaaacacggaaacatttgg

SEQ ID NO: 64 - DNA, 4426 bp, Passer montanus
agggaggagaagcagctctttgcatctccagtgaaagcggtttttgactcacctagtttgcccgaggagaaatcacccggatttttgctgcagcttccagcttctttgtgcatctctgtgatttcctccggcggggactttgcggcgttccagattcccagcgggattggacatcctatccaactcctctccttgttcctggaggatcctggttctctctgggactcccctgaacacgtgagaccggcgtttccagcttggcaccaggagaaatttgcctacaactctctctgggatccacgtggaccgaccagctcgctctgcggtgatatctgattgggttgtgtttgtgtcccaaagtccttggaggggggtttagaagtctctgtgtgtctttcaggaagtgttgtggtggggttttttgggatccagctttagtgccaggggcttataacccagttcttcccgcgtttgccactcgcacggtcggagccatgcagctggacaatgtcaccagcgcgggcgtccactccttccaggggcaccgtggagttgccaacaagcccaatgtgatcctgcagatagggaagtgcagggcagaaatgctggagcatgtccggaggacccaccggcacctcctgacagaggtctccaagcaggtggagcgggagctgaagggattgcagaaatccgtggggaagttggagaacaacttagaggaccacgtcccaactgaaaaccagagatggaagaagtccatcaaggcctgcctggccagatgccaggagaccattgcccacctggagaggtgggtcaagagggagatgaatgtttggaaggaggtctttttccgcctggaaaagtgggctgaccgcctggagtccatgggaggcaaatactgccctggggagcagggcaagcagacagtgtccgtcggggtgggaggtccggagataaggccgagtgagggggagatttatgattatgccctggacatgagccagatgtatgccctgacccctcctcccggggaggtgcccagcatcccccagggccacgattcctaccagtgggtctccgtgtcggaggacgctccagcttcccccgtggagacccaggtgtttgaggatccccgggagttcttgagccacttggaggaatacttaaagcaggtgggtggaacagaggagtattggctgtctcagatccaaaaccacatgaacggcccagctaaaaagtggtgggagtacaagcaggactccgtcaaaaactgggtcgagttcaagaaggagttcctgcagtacagcgagggaactctgactagggatgcgatcaaaagggagctggatttgccccagaaagagggggagcccctggatcagttcctctggcgcaagagagacctgtaccagaccctctatgtggatgcagatgaggaggagatcatccagtacgtggtaggaaccctccagcccaaactgaagcgtttcctgagctaccccctgcccaagaccttagagcagctgatccagagggggaaggaggtccaaggcaacatggagcactctgaggagcccagcccacagaggacccctgaggttcagccaggagactccgtggagaccgtgcccccctcaaccaccgccagtcccgtgccgagcaatgggactcaaccagagccccccagccccccagccactgtcatatgagctcccctgaggggggtctgggttccgtggaagggagaagggggcttatttaggaagcttctccttggagggaagttctggctgagacgagacctgaggagtgctcagtccaacagcccagagcagagggattggctttgctcctggggggagggaggtggtgagggagaggaaccccaggatggggctgcccccctcacccaggccgtgccatgcggtggtgctggggaccctgctggcaccactgcggggaacagccaattttatgagaattccctgacaagaaactagagacaattcccaacttgtgaagcggccgctcggcactggcagctctcaaggacttcatacgagtgcagcagttggtggagggttcctacccatctggatctctctttttccttctctcctccctcctccgagagggtggccctgtcctgaggagacagctttctttttcacccttgcctgtttttgattaacctctgggtttctgttcacttggcaatctcctgctcttacttgctccaaaggattaaagtaattttttgattattttttgttataagaagaaaaaataatcctattatttcaggaactgaaagctttaagaatctggattattttctgtggttttcatttcactgcacctaatacctgctttaatgtgtttcctctcaagaggctcttactggtttacttcttgtcttagtttctgctcactctaattcaaggccactgcagtgcagaggcagatttcatcctttctctgcacattatcctgtgcattcagcaggaaacaggttttctaattaaattctgagctcatttattgaaggagcagtctccttcctttcagagaagagagggtgttcaaggtagagagaggagacaccagagcttttttgagagagactgggggggagggaagggaaataaatccttattctttgaatgaaacaaacaaacacaccctaaattcagagcaaaatatccccagagcagcaaatcgagtccatgctgatgtgtggagacaacagaagcttttgccatgtaaaagccaaaagaagtgaagagaggatctgtgtgccccagcagagttttagcctgtgcatcgctgcaaggagtttctgctcacacagacagaatccaaatgctcctggaaagactggcacccctgtcctgcagcacctgaggacagagtgttgtctgctcacagaggaattcctgcaacatctcaccataaatggagatggacttggactttgtgacttcttccatgttgagacaggaaacgctcagcactcacctttggccagtgcttgatgacaggactgagagaagaaagacattcctgaagtttggctctccaaagcttcccgaggctggacaggtcttgggcatcacctgcatccaccaccagaccaaataaacagcagggatgcagcagcaggagtgaccctgggatgctcctggcactgccacagcggtggcacgtggccctggtggctcggaaggcctttgctgtgactccttccaagaggctgaaggtaaggcagctctctggcattctctcctcagagctgaactggtcatagaatgtccagtagaaactgggataaaaactcagcagaaatgggatatgggattgggttgggagaaaggggaagggagaccagcccaagggaaatacacgaatgggaaaagtttccaaagagggcagtatcctgcactttctgattaatatgggaaaagaatggggagattcttaattagcccagccccagaacctgccttgtccttcatggaaaacctctgggcttgagtccccacctgaggcagcacatcccaggcccatgcacagcccagaggagctgcaggtctgctctgcatccttgctgggagctggtctcaggaatggtgggagctctcctctcacttgttcccagtttgtcaacagctctgcgtgcagagaaaggagcatttctcactaatgacccgggctgagtgatgggggagtgggagtcactgctgaggatgagctggccgtgtattacaagctttgtctcctcttgcttccagtgactcactcagatcctcctctgagaaggaatcacttcgcagcatgcagcgtttgggaggaaagccacagaaaaagctgcaaaacaaaggcctcaatatcagacctgctctcaggaccctcagccaccaatggccagatccaccacctgaaggaaagactggcacaggtaattacatcccatattgctttgtgggtctacctgaatgtccccagtgccctgacctgagatattgaacagcccaggtgcaaacgcctgtgctggtctcaaaacctcagtcccagtggctgcagcagcctggcaccaccagagaggtgggatttcagctccttgctgccagaacccaagcaccagccccagtaattgatgccccacggactgcacattgtggctttcccttggctggaccatgggcaaatccttaaaccccaacacctcataggtcctccaggctgcaggcacagcaaaatttaatcccagctcctgagaatttcccctctatcctcacttcaaaaatctaatcagagttggtgcatttttttttttcttttccagcaatccctgctgctgttgctgagattccttctctgtgtccaagagctttcccaggggagaagaacgtgctgcaggaagaca

SEQ ID NO: 65 - DNA, 6476 bp, Mauremys reevesii
gcgaacgagctgtttgtcgctttcgcccggcacttggcactcgaagttaacagcagattggaaatcgctaggatcttagcaagcagcttctagctgtgtgcgtgtttgagccgatcaagtactctcagccgatcaagatcccgcactccggacgaggagcagcagacaccggacgcagtgggagatcccaggccgggacaccctctctttcccagaggctcactgccctgacggcatcacctgaggcacgtgcgaccagcgcgctcggagcggcctgaacaaatttgccaccgactcctgctggctgcaaaggggactggacagctctccttggggtgatatctgactcggttgtgtttgtgggaggcgtacttggggaggcaagagggggcggtgtgtgcctttcgggagaggatttaaaagcagggcgggagtgtccctaaattaaaagccccggagtaaccactagggctttacctctagttctgttgctttgctgcttggtttaacctgctcacgccacaggtaccatgcagctggatagcatcaccaatgggagcgtccacaccttccaggggcaccgcggagtagccaataagcccaacgtgatcctgcagatagggaagtgcagggctgagatgctggagcatgtcaggaggacccaccggcacctcctcacagaagtgtccaagcaggtggagcgggagctgaaaggcttgcagaaatcagtggggaagctagagaataacctggaggaccatgtcccatccacggacaaccagaggtggaaaaagtccatcaaggcctgcctggcaagatgccaggagaccattgcccacctggagaggtgggttaagagggagatgaatgtctggagggaggttttcttccgcctggagaaatgggcagaccggttggagtctatggggggcaaatatggccccacagaccatgccaggcagactgtctctgtcggggtgggcggcccggagagcaggggcaatgaaggggagatttacgattacgcccttgacatgagccagatgtacgcactgactccctctcccggggagataactagcatgccccagccccacgactcctaccagtggatcactgccccggaggatgttccagcctccccggtggaaacccagatctttgaggacccccgggagttcttgagccacttggaggaatatttgaagcaggtgggagggactgaggagtactggctctctcagatccaaaaccacatgaacgggccagctaaaaagtggtgggaatacaagcaggattcagtcaagaactgggtggagttcaagaaggagttcctgcagtacagcgagggcactttgaccagggacgccatcaaaagggagctggatctaccccagaagcagggggaacccctggacgagttcctttggcgtaagagagacctgtatcagacactctacactgatgcagaggaggaggagattatccagtatgtggtaggcaccctccggcccaaattcaagcgcttcctgagtcaccctttgcccaagaccttagagcagttgatccagagggggaaggaagtcctaagtgacttcgaccagtcagaagagccgaccccgcagagaaccccagagcatcagccaggggactcagttgatagcttgccgccttcaaccacagctagtcccattgccagcgatgagacgcaacccgagccccctaccccaccagctacagtgatatgagctagtataagtatgggattggcctgtattatacaaaggtgtggagggggctgatttaggaagcttctccttagcgagaggttctggctgtgaccagtcatggctggactcagtccaatggccctcggcagaggaatgaactttgtttacggatgggccacgtgagaatgtagctgcccgcctcacccaagtcatgtgacggggtgggggcaagtctgaggatactattttaaccactgtggggtggacagttttatgatactcccggtaggaagctagacagttcccccctgcagaggcagccaccctatgttggcgcctttcaaggacttcagacaggtgcagctattgaccaagagttcccacctacccaccagtttcgtatcctctggagaggggtccccttcctcagtggaacatccttgttttgactcttgctcatctctgccttattgacagggctttgtccagcccaagaggaagccactggcttctgcttccctcgcaacctcccaccatagcttcagggaggaaactttttaaaagttcatcatggttttgaagtgagcctagagctgcggcaaatggcaactttaacgggtttgatcaattttaccacctgctgttgtatctcacctggcacctgctctcatttttcctcccagtggttctctcccgttctcagctccttctctccccgtgggtgactcatgccaacaggctgttgcagcaacaagggaaatttcatcccatgtctgctgctaccacggggagggaagcccaaactcactccctcgccatccctccaggtggcaattcagcatgtgctgtttcaccactagactgggcactactaaacctttgttccttgctgcattactcttctctatctgagattcaggatcaggcagattaatggggataagccagagatctttctactttgagggacgtgaaatggggcaatcagacaaggcaccaatattgtacaggggtaaattcctatttttttttatatcaaacaaacacaccctgaactcagagcaaatttcccccaagcagcaaagcatggcccctccattggagatgccaggacagtaggacatcagcagtccatttctgtgggactttgccacaggaaagcagaaacaaagttaagaggtgctacatgtgttgggtccgagaccctgcttgcaaagaagactccttgatggcagatctacacacacattgcttttggaaggcctgatgtcctaggtatgaggagtccgatggcagaactgtgtctaaaaccgatggactttctaaaccagccccttcgttctgcaagctggtactagatggagctggaattgggctctgtgctacttttccacgttaaatatcaaagaccagaactggctgcactttgactaaagcatgaagatgggactctgagacaggacatttggagcttcttgctcgtcaggtcatactgaggaaggctttactggaggtgtgccagcaacagtgtctcacaccgccaacagctgcacttcagcaactgcatagcatccatcacctgatttaataggcagcatcagcacgtgcgaggaaaagagaaactacaaggagtagctggaatttccctgggactctgcagctgcccaggtggctctgaaagcctttgggtgtgacaccttcccagaggctgaaggtaagacagcttccccactctgcaattagcaagtgttaaggcaggtgtcataggagctaactcagccccggggggcccacaatactgaagccaggggagttgcaccaagactgaccttggtccctaaacttaggtgcgccgctgaagcgtgtcacgcagagagagggatggagattgctttgcatggccccagcaggtataatagttcggagtaagggaagcggatcgagcaaagggaaattaaatgcattgaactgtgggataatgccctgaggggaggaggggacatttaaaacagggataattacccctcctgctagctaaccagcctaccagctccctctttggcacagctgaataagccactgcctctagactaagagtttccaagttcaagtcctgaggagagtgacctgcacagcatgagtcgagtctcagctctggggactttacccatgtctgggccagagggcaagcgtcctttcctcgctgccgagacacctttgcttggctttgactgcatgcccgtgcagaagggggatctttagcgagctgggacgcgtgggaatggatgacagagtgtcagtgcaaaggagtatctgtcactgtggctcacgggtattctctgctttgttacagtgactcactcagcccctcctccgaagaattcactccatgctgctcctagcacagacgaaaagaggcttgaattccaagggggagcagatgtcagaattcaaagccaccgtgtgcctcatctggagtcctgagggaaacactcagaccaggtaattagtgccgagcctcctaaagggtctgatgccaagtgccccctgaagggtggtggtgccagtgcatgcaccacccagaggagtttattcctgatagagggggtgggcatcacagccttgtcttctgcttatgacattcaggccaccaagcagccatcagggtctgacccaggccaccaggggggatgtctccacagaaaagaaaaacccacggctggcccgagtcagtcgaccggggctgcggggctgtgtagacatccagactggggttggagcctgagctctgggaccctcccagcctgcagggtcctagatcccgggctcctccttggcggtctaccctgaaagcattccctccctccagcccctgctccatcccgcaccctccacttaatcttgcttgttgttgcttttagggattgctgctactgttgctgagactctttccatgtggctgggagccgctgtttccattgggaagaacgggagagctcccagaagagccttctgccagagaaagaggtggtgggatgaaagagcggctttaaagacacagcgacgaagagacggagagggaactacatccgctgagcagaaaaagctccagcggttgcgctggccaaagccgggccaagctgaatacagcaagctccgcatggaaggaaaggcaaaagtggccatgaaggaacaagctggtccttggactttggggacagcaggggcgctgcagttgggttgtaactgagcaatactccctgctgatttaggcgtaactgcacccggggatttggaggctgatgggggctggaggaaagaattgatccttggttgcgaacgaaaatcctgctctgattcaatttgccgaaagtgacagatccaagcaggccgcgaactctcctggttgttaacgttttaactcatttgacctgactgcgggtagtttcatttcatgcaggtagccgtggtcaaaccgcaatagctttgggggttcagaaaagcatcctggaagccagacgcttgtctgaacaatgtgagtctgcacaactgggccagtcagctcacaagaacagaccctcttgtgagagaataggcacttcctgcttctggatgggccagaattactgcaagaactgggcttcttgtgctactttggtgcttttctttccggccagaaccaggaagtggaatggtgtgtgaaaaacaatcatgtgagtgaaaattgacccaacttttttgaacttcaagaaagttttggttcatgtgttgggtgaagggtcaggttggttcttatttcttccaaatccacctgtcccatgtgtgtgtgtgtgtgtgtgtgcgcgtgcgctgagcaaccaaatcaatctcaataaccaaattctgcagcattttgttacattttgactgaacctatgatatctgatgcatactccaacgatcagtcagcaaaaatgcccggggaccagattgtgtggatgccacaggaagctggcagctaggtagaccaccggggtaaaaatcccttgttttgcagtgctcagtacgaaggctttttcagggacccccaatatccactggcattgtcttttggcattttcttttcctgaacatttattctcactttgctaaataaatgaagcgaaccgagccatggcaccttttggctctgggatttttgtcacctgacctttagaagtatgcagaactggtactggttttattccactggttgctcctagcagattggagctttacttgtagcaccccggtttatataatcagctcttcttgaaaggactgatagtatttctgtcccggggcagactggcgtgtgtgagttggtgtgtgttgtgtctgtggaacctaaacagaattctactcctgtatcattttcttaggcaattttacattttaactctgacaaagctgctacataggtttatttttactatagatcttattaattcagactgtattgtataaaaggtgactgtgtggagccattacaggcctctgtattcactgtattaggttggaagccaaaggtctttgcacggtgaaataacttgacctaattctgactgtatctgctcgtttatccctcatgtgtcaccttggagttactgactcacccaaacggtgtcagtcgctagaatctgtcaatagaacaacaccccattctgtttgccattgtagcaaagtctgttcttagaaaagagccttttgtagatttatttaataaaa

SEQ ID NO: 66 - DNA, 4654 bp, Crotalus tigris
gtgtgcagtataagtatgggtctccatctgagtgagtggcagagcagagagagaaactgaacagctctctgctttgcaactctcggagaaggaaaagcacacgctcttcgttcgctgaaagttctcaggagggtctggaacccgcggagaagcagcgcaggcagctgagagaggtggcctccaacccatcaagaggaacctgagagatctgcttgggaattaaagccttctagacgaggaggaggagaagaagaagaagaaagaagtcagggctggggagaactttcctggtttgctctgtggactttttgcttcaacgccaagtggagttagacggccacaatttttctggggggatctctgattcagttgtgtttggtgcttctggggagaagaaagcaagtcagttcctgggcagagtggtttggagaagagtcacttgttgagggtggaagtgttctggggctacagtagcagaggtagaaacgatgcaggtggacaacttcaaccatgggaacctccattcttcccaaggtcaccgcgggatggccaacaacaagcccaacgtcatccttcagataggaaagtgcagggctgagatgctagaccatgtgaggagaacccatcggcacctcctgaccgaggtgtccaaacaggtggagcgggagctgaaaggcctacagaaatcggtggggagactggagaacaatctagaggaccacgttccctcagccgcagagaaccagagatggaagaagtccatcaaggcttgtctggctagatgtcaggagaccattgctcacctggagaggtgggtcaagagggagattaatgtctggaaggaagtcttcttccgcttggagaaatgggccgatcggttggaatctggcggggggaagtaccctcatgctgatcacgccaggcaaactgtctcggtgggcgtagggggtccggaaattcaacccagcaaagatgagatttatgattacgccttagacatgagtcagatgtatgccctgacccctcctcctatcggggaagcccctagtgtgcctcagccccatgactcctatcagtggatcactgtcccagaagatacgccatcctccccggtggagacccagatttttgaggatcccagggaattcctgactcatctggaggattatctgaagcaggtgggtgggaccgaagagtactggctctcgcagatccagaaccacatgaatggtcctgccaaaaaatggtgggaatacaagcaggactcggtcaagaactggctggagtttaagaaagagttcctccagtacagtgagggtactctgacacgggatgccatcagacaggaactggacctgccccagaagaatggggagccccttgaccagttcctttggcgcaaaagggacttataccagactctacacacagaggctgacgaagaagagatcatccagtatgttgtagggaccctccagcccaaacttaagcattttcttagccacccctaccccaaaaccttagaacagctgatccagcggggcaaggaagttgagggcaactttgatcattctgaggagcccagtccccagaggtcccccaaaaaccagttaggaggatcagtggaaagtttacccccttcttcgactgctagccctgtcgctagtgatgaaacccatccagatgtttctgctccaccagccacggtgatctgagcccagaaaacaaggcactagacacacaggtgggaactatcagcttcttgagcaggtttgttcccattcagtgggtgcctcgggctaccctgaagatactgagatctcagctcagcagctggttgaaggtgactggctttttcttctggtatcccacgtggagatcatagcaagcttgaatcatctgaggtgcttcaagctggaacctcggtagctgagtttgagaatggctttctaaaagcaaggattggacgatgttatcaaggtaggaatccttcttttgaggcagagacaactgtgtccccgtgggtgatgattccctagggatttaaatagacaccaacacagaaggtccatccttctaacgtcagttctgtccttcaacgtggttttccttccaggcattctctcgtccttccaggtagctgttgagagatgacgtctgtttatctctgcattagccaatggatttactgactttctaggaagtttctatttttttataatttcctcggcatcttttagaccaagctccaaaacctgttggaaagcaagtttcaagtgtcctggcagaatttcaacagaaattccagccaccacttgaagttgtgttgttttggcctccgttgtgattcttagatgggtctctggattctctctgacctgatttttaaggtccttcagctccaggaaagcccttagtagatacaaacttcccacctttccttctctaaatccatgccattgagaggagaagggttcatacaattgaatgtcttgcctcatacacgagggcgataagcagagttctagagaagatagagatttttaagaaatgtctatggggttcagaaaaacatagaagacgctgaggttggagggatgcatagactataagaagggaaaatgttgcacaaacacagcttgaatgtagaatttatcccgcctacaagaacatctactaaagttgtactagctttcgctagttgaaaaaaaaaatggactgagtatttcagtagtggggatcaccttaccaaaggtgtaaagacccttgaagctgtttagctgagcctcatttgatgatgcaaacaagaagcaaattgggaggaagatccgcaactttgagactcttgtgcagttaaagacagaaaagaagagagaagtaaacaccaaagttcgtatcttgggcagacaacgtggcatgcagaggaggtgatgaagagcagctgtgaaaatcttgctgggaaccatggggagatgtgattccttcccataggctagaggtaagtagctagctcttggctttttgtctttcccaagtttaatgttgttgatgatgatgacaacttgggctagtttaggctggattcacacaatgcatgacgtgaacatgggtttggggacttgatggtttagcaggacctcaggttaaggcacaatggggttgggacctagcatgaacaccagaacacctatgcttttctggtgtcacaaaaatttggggatttctggtatgaatctgctcctccttttgctcctgttggcagtccaaactctttgcaaaagggaaggagcagtcaaaattacattttgctcctctgaaaagaaagaggaatggcaactgggttgtgtgaacgaggttattctcccgactgctgtgtgtaagcatttctttatcttcgagagcaaactggctgagggatttttgtgcaaatgaaacaatccaactggagcttaatgaggaaggaaggaaggaaggaaggaaggaaggaaggaaggaaggaaggaaggaaggaaggaaggaaggaaggaaggaaggaaggaatatctcctaatattaagggttgatgtgctgaagcaggtttagttcacacttcatgttatgcttctgttacagtgactcattcaaaactggctgcgagttcagcgcttcctgaatcacacgtggagcagagatggagacggagggacggttctggaaaagcccagaaagcaacagagttggatggacgtcatcttcccctagctcctgctgctctcgcagaacgagtgcctgaagaaggagaaggtaatgtgagttctctatcagatggagaaagtgctctgcctgctcttaactagcctccagataaatgtccatggaggttctggttgccattccaggtcctggttgtccccaaaggtgcttcttcacgaggcaaccggactttctagtttttctttgaagacgttaggcacctcatccaagaagcttcttccgctctgactggatggtggggaagaatggaaggttttttttacagctgtctgcaaggagcataagtcctcccattccccaccgtccagtcagagctgaagaagcttcttggatgagaagcaaaacgtcttcaaaagaaaaacaagaaagtccaggtgcctcctgaaaaagcaccctggagataacctccagacagaagttctggattctcctgatgcttacacctcctcctgaactgggaaggagaagtttagattcccaatttcacagcacactttgggaaagagatgcttggaaatatctctttgggacttccctaaagaggcaagactcaagaatatcctacctttgttaggtcctgtttcaaataggtccttctaccttctcttctctagagatttctctgcctcatcatgcctaaggaaaggataggaaaccctgtactcctaactcccagatttggatgtgggggttccccaacctcctgcattggccatgctggctgggatatacacacttgcgccttttcttcccgttgtagtatccggtcgcttaatcttctctttctttctttctttttcttatcatagggagttgttttcttctgtggttggtgacatagcacctgaattcttcaacggcttcaccttttgcatgcagaagtggtgtttcctgaggaact

SEQ ID NO: 67 - DNA, 3238 bp, Hyaena hyaena
cagcccgccgcctcccgcccgtccgagcgccgcggccacctgcctgctcaccgatggagctggaccacatgacgagcggcggcctccacgcctaccccgggccgcggggcgggccggccgccaagcccaacgtgatcctgcagatcggtaagtgccgggccgagatgctggagcacgtgcggaggacgcaccggcacctgctgaccgaggtgtccaagcaggtggagcgggagctgaaggggctgcaccgctcggtgggcaagctggagagcaacctggacggctacgtgcccaccggcgactcgcagcgctggaagaagtccatcaaggcctgcctgtgccgctgccaggagaccatcgccaacctggagcgctgggtcaagcgggagatgcacgtgtggcgggaggtcttctaccggctggagaggtgggccgaccgcctggagtccatgggcggcaagtacccggtgggcagcgagccggcccgccacaccgtgtccgtgggcgtcgggggtcccgagagctactgccacgacgccgatggctacgactacacggtcagcccctacgccatcaccccgcccccggcctccggcgagctgcccgggcaggaggccgtggaggcccagcagtacccgccctgggcgcccggcgaggacgggcagcccagccccggtgtggacacgcagatcttcgaggacccgagggagttcctcagccacctggaggagtacctgcgacaggtgggcggctccgaggagtactggctgtcccaaatccagaaccacatgaacgggccggccaagaagtggtgggagttcaagcagggctccgtgaagaactgggtggagttcaagaaggaattcctgcagtacagcgagggcacgctgtcgcgggaggccatccagcgcgagctggacctgccgcagaagcagggggagccgctggaccagttcctgtggcgcaagcgggacctctaccagacgctgtacgtggacgccgaggaggaggagatcatccagtacgtggtgggcaccctgcagcccaagctgaagcgctttctgcgccacccgctgcccaagaccctggagcagctcatccagaggggcaaggaagttcaggacgggctggagcaggcgtcggagccagccggccccccgctgccggccgacgaggaggccgagaccctcacgccggccctcaccagcgagtctgtggccagcgaccggacccagcccgaatagaggccggcccgggtcccagcccgcccaccacacctgcccgtggcctttgccagccaggactgccgagccgggctgactccctcgggggagagccctcggcctcctccggctgggcgccccacctctgcccccccccccccccccccccccccccccccccccccccccccccgccggactcacacagccacgcatcatccagatgtgggcagcaccccccaaacagcgaaggggcccgctgtcctgctgggcccctgccccgtcgccctcctcctgtctgtccttcccggcccctgactgcaccccgcacactctcaggccatgacctgacctccaggctgtgatctcccgctctgcgcctggggcccccggcacttggagaccaagtgtccggacagcacaggccagtgagctccaagctcaagggacaccccggaacagaagcgcagacaggccgctgctgcggggaccctggcttcggcgcgccgcctcctcctggcagttgctgcgcggccggctggcgccgttgtcgccgccccgggcagccggccagcctcgggcagcgaggctccctcctcctggaggaaagcggaggccaaagacgcggcgacagcggcggcagcagcagacctggcgtcctggtgtctcctggcccctcaggtgagcccctgccgcagggcagcgccgccggggggggcgccgtagagcagggagggcccagggccaggtccattttctgggtgagcccactgaggctcagaggcgtccccagccagttagctgcaggggtggtgtgatgggggctgcagaaacccccggggtcagggagcagggctggggcgggaggcggggctgggaggctgccgagctggctctcactcgaccccgcgctttctcctcagcaccagtgattcacaccagcctggaaaaggatcggctgggctcgatgactcacccacggcaggcggagggtcccacggggcccgaaccctcacactcagctgaggagccgggagagtgacgacaggtaatgggggcccagccctccctctgggacactgtccctcgctgtccctcccgggatcccaggcccagcgcccccccccagcagcgccccgaggggccgccccgtaacgacctcccacacccttcccgtggagcccgtcccagcctccggcctgcccctgacccccgagtctctctttcaggtcctgaggctcccacagcgcctctgccgcccgccaggcacgccccgccctctcgtccccgagcctcctgcgccggaggaggggacgctgaggtcagcgagcggggctgcggagaggacagcgcggcggagagctggtgctggagacgggccagcgtgagggcccgggcctgccgctcggcctgccccgctggccaccagcctgcccgcccccgggtccgcagcggctggagccggccttgctccagcccaggaccccccccccccgccatcgcccttcctgcggtggccgtcctctcccaccagagctttccagaagctctgacgccgaggccccagccctgcgaggtcccagcccctggggcgtaagcgggctctcggccaggccccgccgttgccggggcccagacccccacctccccagacagcagcaccccggtgcccaccggccactcgcgtctgcagcgcctgcagccccatcaggccctggctggggttctcctttccgcctgtctagtgggggttcccgggttcagaagactgatgtctgcaggtgatgctgtccgcgccgccaccccgcacccctgccagcccccagatcttatttttgcacataagccataacccatactcacgagctggcatgggctgcagggagccccggggtcctcaggagggtgtggccagccctccctgtccccagtggatcaggccttgatgtcaggccaagctgtgtgcgtgtccccccctccccccccctcgccaccttacctgaagacagactttt

SEQ ID NO: 68 - DNA, 4382 bp, Tachyglossus aculeatus
cccaggaagctggatccaggccgacccagggaactgtagccgggaaagcctgtttgctctcctggtttggttccgagcgacgggagaggacccccgccgaccaccgggaacccttcagggaccagagagagacagagaggcagagagaacacagtgagggcccaaccgactctcgcccgctcacctatcggtggaatcgttctctgcccccgacgacccagcgaacgcttctcctcaccggacatcggacccgatggagctggaccgcatgaaccccagctctgggctgcaccccagcagtgggctgcacccctatcctggccagagggcgggagtgaccgcgaagcccaatgtcatcttgcagattgggaagtgccgggcagagatgctggaacacgtgcgcaagacccaccggcacctactggctgaggtatcccgccaggtggagcgggagctgaagggcctgcacaagtccgtgggcaagctggagagcaacctggacggctacgtgccctcctcagactcccaacgctggaagaagtccatcaaggcctgcctgtcccgctgccaggagaccatcgcccacctggagcgctgggtcaaacgggagatgaacgtctggagggaggtcttctaccggctggagcgctgggcggaccgcctggaggccatggggggcaagtaccctgcgggcgagcaggcccggaggacggtgtcagtgggcgtgggtggccctgagaccagctgcccgggggaagagagctatgactgtcccatcagtccctatgccatccccccctccaccggagagtccccagagagcctggaccagggtgaccagcactaccagcaatggttcgccctgcccgaagagtcgccggtcagtccgggagtggacactcagatctttgaggacccacgcgagttcctgcgtcacctggagaagtacctgaagcaggtgggtggcacggaggaggactggctgtcccagatccagaaccacatgaatgggccggccaagaaatggtgggagtacaagcagggctccgtgaagaactggctggagttcaagaaggagttcctgcagtacagcgagggcacgctgacccgagacgccctcaagcgcgagctggacctaccccagaagcagggtgagcccctggaccagtttctctggcgcaagcgagacctgtaccagaccctgtacgtggatgccgacgaggaggagatcatccagtacgtagtcgggacgctgcagcccaagctcaagcgcttcctccaccacccgctgcccaagacgctggagcagctgatccagaggggccaggaggtccagaatgggctggagccaaccgatgaccaggccggacagaggacccagtctgaagacaatgacgagtcgctgaccccagccgtcaccaatgagtccaccgccagcgaagggaccctgcccgagtagaggctgctcccttgcgccaccccccgtgtcacccctgtgcccaccacagcctgtttccacccgctccctcctctctgaccacggggagtttgacttgacttccagatggacacatggagaatgataacctcaggggtacgccctgactctttcaacagcagacacagcattcaagacaccccttgctgagtctgctgccctgcttctagtcccatcagcatcttccctgcagcctaacagccacttctcggggtcaccccgacccgaggcacaattggccactcttgaccccctcaccactcccaccatgccaccctcatcctcctgctcctcctcttcctctgcactgaagacatcaaaagagcctgatgtgcagcactccccccggacaacatgaagcccagacatgacctggtcctggcccttcagctcatgcactccagaagacatcctgtctgaaccccactcagaaggggactgaggggaagcctggtcccaagcctgtcctgacagccccctctgggatgcagccacagtgttctgctctccccaagacacttcttgcacagtgaccacagcagcagaggcagcaaatggtgtccagtggtggcttcagtgtctcccaagagcaagaaggtagggtgcaccaggctttacctgcactttcagggcggcagctctgggctctgggtggcagaaggggatagggggagctcaggggagttcatctgtgctcaatgccctcctccttcagtggcccaaagactggcgagtctggtccagatccccaggaggctgggaggggagctgtgggagtctgtaggagcagcaggaactctagggatctcactgaggctgtggggttctctttcaaggtgtgatgactcggccagtgctggcagtcgagagccgatgattcaggcagagcagagctcggacagtgggagcccagatccaggatgcggcccgaaatctgcgatgggcgtcctgtggcagccaccacgtggtctaaccagtcagagcctccaggtaaatttctcttgacattctgagctgccccctcctctaccccatgctctccaagccattttttaccctcagccctggatcattctcacaagggcaactcaggccatcaggctgttagcaccccagccacctgccccccacccaggacaacctactggcccttccatccccactacagatctctgcataggaatgtgccgccttgggcttttccaaagggcagaaaggcacagagataatgctaattattgtgccattgattaaggacttacagagaggaggaggaggctgggtgctgaggtagacctgggaatcgtctcttgaatctgaatagcacatgtgcttttccaaagcacttttacaacaggaatctcattcttttctctccttgggaggaaggtagaagaagggattatcacccccatttgacagatgggaaaatggaggcccagagaggctaagtgaatggctcaaggtcatatagagcagggcaatggcagaactgaaatcagaacctgattttcccacttatggacccatgtacttacccctagacccctcatgcctccccagcaatggtcctcagactttcccctggcctggggagggtgggacacggggctctaccccctcaccaaggctagtcccgagacctaggctctcacctgtagcaaacagagactctttgagggtgggaggcagaacagagccatgtctccccggcccgtgccagctagaaactggcacccatctccctccccagccccactgctccagctccccgatctatccctccccttcccaccccccaccccactaggggccatagtctaacctagattctcctggttatggttttaggtacccatatcctaccaacccgtgctgctgcatacgagagaaagtgccttgggaaggcagagtctgagtcagcagagctccatgccccagagaggaggaggaggagaaaaagagctgggcagctgcttccccaaccacgtgaagctgaagccaggcagaggagaccagtgaagaacagaacagccaagacccagcagggacggggagacacaagctgccctgaatcccctctctccgggggagaggctccctggagaagaaggcccgcaagatgctttttgatcacagccagttcctgagggagtctgctgttcgaagagtctctgctctttcccagagtgtgagggggactgggtgggggagggagagtgccctgtcttccccacattgccacctgctgccctcgagttcctcgctgggctgcatgggactggggagtgtagagcacaactgagtccagggtcccaacatcctgattgccccaactttgacagtggccagatgcctggcccaaactaattgatctgagttttctccatcccccaaaccccccactctcccaccatttgcgacggtcggtcagtgcaccacccaatggcccatccccccgtggcggggccaattcagccagtggcaggcccttgccctttcccaaactgtagaccttccaccctcctgttgcaccatgtggctgaaatgcccaccccgagtccactgaagctgctttgatacacacatctttattttttcatacctagaactgatccatcagcccggttggtcaaccagcctgggcctggggctcaattggccccaggctcgctgggccctgggttcgcttgacccgcttcatgccaaagctgtttgctcactgctgccatgtgacctttaagtcccaagggccacagagcggatatgtcggagtcggggtcatgggtgctgttgaactgctgaatcccatctggggccaggggtcaggtgctggtcacaatccatcgcagcaggaaaattgccttttgtaagatttctttaa

SEQ ID NO: 69 - DNA, 5653 bp, Dermochelys coriacea
ccgacgggggaagcaatagagctctttgtcgctttcacccggcactcagcactcgaagttagcagcagtttggaaggcaaaagagaaattgctaggatattagccggcagcttctacctgtgtgtgtgtttcagcagagggaactctcggctgatcaagatcccacactccggaagaggacggcagtcaccgcacacggtgggagatcccagccgggacgctctctctttcccagacgctcaccgcctgacagcgtcgccctagacacgtgggaccagcatgcttggaacggcctgaaagaatttgccaccgactcctgctggctgcaaaggggactggacagctctccttggggtgatatctgactcggttgtgtttgtgtgagacatacttggggaagccagaggggggcggtgtgtgcctttcgggagaggatttaaaagcagggcgggagtgtcactaaattaaaagcccggggtaaccactagggctttacctctagctctgttgcgttgctgcttggtttagcctgctcacgccacaggaaccatgcagctggatagcatcaccaatgggagcgtccataccttccaggcgcaccgtggagtagccaataagcccaacgtgatcctgcagatagggaagtgcaggactgagatgctggagcacgtcagaaggacccaccggcacctcctcacggaggtgtccaagcaggtggagagggagctgaaaggcttgcagaaatcagtggggaagctagagaataacctggaggaccatgtcccatccacggacaaccagaggtggaaaaagtccatcaaggcctgcctggccagatgccaggagaccattgcccacctggagaggtgggttaagagggagatgaatgtctggagggaggtgttcttccgcctggagaaatgggcagaccggttggagtctatggggagcaaatatggccccacggaccatgccaggcagactgtctccgtgggggtgggcggcccggagggcaggggcaatgatggggagatttacgattacgcccttgacatgagccagatgtatgcactgactcctctcccggggagataactagcttgccccagccccacgactcctaccagtggatcaccgccccggaggacactccggcctccccagtggagacccagatcttcgaggacccccgggagttcttgagccacttggaggaatatctgaagcaggtgggagggacggaggagtactggctttctcaaatccaaaaccacatgaacggcccagctaaaaagtggtgggagtataagcaggactcggtcaagaactgggtggagttcaagaaggagttcctgcagtacagcgagggcactttgaccagggacgccatcaaacgggagctggatctaccccagaagcagggggaacccctggatgagttcctctggcgtaagagagacctgtatcagacactctacactgatgcagaggaggaggagattatccaatatgtggtaggcaccctccggcccaaattcaagcgtttcctgagtcaccccttgcccaagaccttggagcagttgatccagagggggaaggaagtcctaagtgactttgaccagtcagaagagccgaccccccagaggaccccagagcatcagccaggggactcagttgatagcctgacaccttcaaccacagctagtcccattgccagcgaagagacgcaacctgagccccctagcccaccaactacggtgatatgagctagtataactacgggattggcctgtattatacaaaggtgtggagggggctgatttaggaagcttctccttagtgagaggttctggctatggccagtcatggctggactcagtccagtggccctcggcagaggaatgaactttgtttacggatgggccacgtgagaacgtagctgcccgcctcacccgagtcatgtgatgggggtggtgcgagtctgaggatactattttaaccactgtggggtggacagttttatgatactcctggtacaaagctagactgttcccccctgcagaggcagccaccctatgctggtgcctttcaggacttcaaacaggtgcagctattgaccaagagttcccacctacccaccagtctcgtatcctctggagaggggtccccttcctcagtggaacatccttgttttgacactttcccgtctctgccatactgacgggactttgtccagcccaagaggaagccactggcttctgcttcctttgcaacctcccaccaaagcttcagggcagaaacttttttaaagttcataatggttttgaagtgagcctagaacttgcaaatagcaactttaagggggttgatcaattttaccatctgacattgtatctcacccggcacctgctctcatttttcctcccaggggttctctccctttcccagctccttctctccccgtgggtgacccatgccaacaggccattgtagcaacaagggaaattttatcccatgtccgctgctacctaggggagggaagcccacacttgctccccaccatccctccaggtggcaattcagcacatgctgtttcaccactagactgggcgcaactaaacttttgttccttgctgcattagtcttctctagctaagattcaggaccaggcagatgaatggggataagccagagatctgtctactttgggggctgtgagatggggcattcagacaaggcacccatattgtactggggtaaattcttattcttttttttaaataaaaaaacacaccctgaactcagagcaaatatcccccaagcagcaaagcaaggcccctccactggagatgccagtacaataggacatcagcaatccatttctgtgaaactttgccacgggaaatcagaaagaaagttaggaggtgctacatgtgttgggtcccagaccctgcttgcaaagaagactccttgatggcagatctacacacacacattgcttttggaaaggtctgatgtcctaggtatgaggagtctgatggatgaactttgtctaaaactgatggactttctaaaccagccccttcgttctgcaagctggtactagatggagctggaattgggctctgtgctccttttccacgttaaatatcaaagaccagaactggctgcactttgactaaagcatgaagatgggactttgagacaggacgtttggaccttcttggttttcaagcctggctaacatactgaggaaggctttactgggggtgtgctagcaacagtgccccacaccactgacggctgcacttcagcaactgcatagaatccatcacctaataggcagcatcagcacatgagaggaagagataaactacaaggagtagctggaatttccttgggactccacagctgccccggtggctctgaaagcctttgggtgtgactccttcccagaggctgaaggtaagacaacttccccactctgcaattagcaagtgttaaggcaggtgtcataggagctaactcagccccagagtgcgtgggtcccacagcactgaagtcaggggtgttgcgccaagactgacctcggcccctaaacttaagtgcgccgctgaagcgtgtaatgccaaagagagggatggcgattgcatagcatggcccaagcgggtataataacttagagtaagggagcggatccagcaaagggaaattaaatgcattgaactgtgggataatgtcctgaggggaggggtgggacatttaaaacagggatgatgacccctcctgctagctaagcaacctaccagctccctctttggcacagctgaataagcgactgcctctagactaagaggttccaagttcaagtcctggggatagtaacctacacagcatgagttgagtctcagggctggggactttgcccatgtctgggacagagagcaagtgttctttccttgctgctgagacatctttgcttggctgtgactgaatgtcagtgcagaagggggatctttacactagcaagctgagatctgtgggaatggatgacagagagtcaatgcaaagtagtatctgtcactgtggctcacgtgtattatctacattcttacagtgactaactcagaccctcctctgaagaattcacttcatgctgttcctagcacagaagaaaagaggcttgaattccaagggttcagcaagggggagcggatgtcagaattcaaagccaccatgtgtctcatctgcagtcctgagggaaacacccagaccggtaattagtgctcagccagacctttccaaatctcctaaagggtctgatgccaagtgctgaagggtgctcgatgccattgcacgcaccacccagaggagtttattcctgaaagggggagtgggcatcacagccttgtcttctgcttatgacattcaggccaccaagcagccatcagggtctgacccaggccactgggggtatatctacacagcaaagaaaaccccacggctggcccgggctagtctactggggctgcggggctgcgtagatgtctgggctggggttggagcctgagctctgggaccctcccagccctcagggtcctagagcccaggctccacccttgtgtcctagccctgaaagtattccctccctccaggccctgctccatcctgcaacctccacttaatcctgtttgttgttgcttttagggattgctgctactgttgctggcctctttctgtgcagctgggagccgctgtttccactgggaagaacaggagacctcagcactcccagaagagccttctgccagagaaagaggtgatgggatgaaagagtggctttaaagacacggcgatgaagagtcaaagagggagctacatccgctgagcagaaaaagctccagagatggcactagtcaaaactgggccacactcagtagaccaagctctttatagaaggaaaggcaaaagtgggcatgaagaaacaagctagtccttggactttggggacagcaggaacgctggagttgtgctataactgcacaatattccctgctgatttaggcataactgcacccagggaattggaggctgatggggcctggaggaaagaatcgatccttggttgagaactaaaatcctgctctgattcaattggcgaaagcgacagatccaagggggccgcgaactcttctggttgttaatgttttaactcatttgacctaagtgtgggcagtttcgtttcatgcaggtagccaaggtcaaatctcaatagctttggaggttcagaaaagcatcctggaagtcagatgcttgtctgaacaatgtgaatctgcacaactgggccagtcagctcacaagaacagaccctcttgtgagataatagacacttcctgcttctggatgggccagaattaccgcaagaactgggtttcttgtgctactttggtgcttttctttccggccagaaccaggaagtgtaatggggtgtgaaaaacaatcatgctggtgaaattgacccaacttttttgaacgtcaagaaagttttggttcatgtcttgggtgaagggtcgggtcggttcttatttcttccaaatccacccgtcctgtatatgtgtgcgtgtgtgtgtgtatgtgtgctgagcaaccaaat

SEQ ID NO: 70 - DNA, 1191 bp, Arvicola amphibius
atggagctggaccataggacgaccggtggcctccacgcctaccctgcccagcggggcgggccggcagctaagcccaatgtgatcctgcagatcggtaagtgccgagccgagatgctggagcatgtgcggaggacccaccggcacctgctgaccgaagtgtccaagcaggtggagcgagagctgaaagggttgcacaggtcggtgggcaagctggagaacaacttggacggctatgtgcctaccggcgactcacagcgctggaagaagtccatcaaggcctgtctctgccgctgccaggagaccatcgccaacctggagcgctgggtcaagcgtgagatgcacgtgtggcgggaggtcttctatcgcctggagaggtgggccgaccgcctggagtccatgggcggcaagtacccggtgggcagcgagccggctcgccacactgtctctgtaggtgtggggggtccagagccctactgccaggaagctgatgggtatgactacactgtcagcccctatgccatcactccaccacctgctgctggagagctgcctgatcaggaatcagtggaggcccagcaataccagtcctgggggtcaggtgaggatgggcaaccaagccctggtgtggatacccagatcttcgaggacccacgggagttcctgagccacctggaagagtacctgcggcaggtgggtggctccgaagaatattggctgtcccagatccagaaccatatgaacgggccagccaagaagtggtgggagttcaagcagggctcagtgaagaactgggtagagttcaagaaggagtttctgcagtacagtgagggcacgctctcccgtgaagccatccagcgggagctggacctgccgcagaagcagggtgagccactggaccagttcctgtggcgcaagcgggacctgtaccaaacactgtatgtggacgctgaggaggaggagatcatccagtatgtggtgggcaccctgcagcccaagctcaagcgctttctacgccacccgctgcctaagactctggagcagctcatccagaggggcatggaagtgcaggacggcctggagcaggcagctgagccttctggaaccccactgcccacagaagatgagacggaggccctcacacctgcccttaccagcgagtcagtagccagtgacaggacccagcctgaatag

SEQ ID NO: 71 - DNA, 6146 bp, Motacilla alba alba
agggaggagaagcagctctttgcatctccagtgaaagcggtttttgactcacctagtttgcccgaggagaaatcacccggatttttgctgcagcttccagcttctttgtgcatctctgtgatttttctccggcggggactttgcggcgttccagattcccagcgggattggacatcctatccaactcctctctctgttcctggaggatcctggttctctctgggacacccctgaacacgtgagaccggcgtttccagcttggcaccgggagaaatttgcctacaactctctctgggatccacgtggaccaaccagctcgctctgcggtgatatctgattgggttgtgtttgtgtccaaaagtccttggaggggggtttagaagtctctgtgtgtctctcaggaagtgttgtggtgggggtttttgggatccagctttagtgccaggggcttataacccagttcttcccgcgttttgccactcgcacggtcggagccatgcagctggacaatgtcaccagcgcgggcgtccactccttccaggggcaccgtggagttgccaacaagcccaatgtgatcctgcagatagggaagtgcagggcagaaatgctggagcatgtccggaggacccacaggcacctcctgacagaggtctccaagcaagtggagcgggagctgaagggattgcagaaatccgtggggaagttggagaacaacttagaggaccatgtcccaactgaaaaccagagatggaagaagtccatcaaggcctgcctggccaggtgccaggagaccattgcccacctggagaggtgggtcaagagggagatgaatgtttggaaggaggtctttttccgcctggaaaagtgggctgaccgcctggagtccatgggaggcaaatactgccctggagagcagggcaagcagacggtgtccgtgggggtgggaggcccagagataaggccgagtgagggggagatttatgattatgccctggacatgagccagatgtatgccctgacccctcctcccggggaggtgcctagcatcccccagggccatgattcctaccagtgggtctccgtgtcggaggacgctccagcctccccggtggagacccaggtgtttgaggatccccgggagttcttgagccacttggaggaatacttaaagcaggtgggtggaacagaggagtattggctgtctcagatccaaaaccacatgaacggcccagctaaaaagtggtgggagtacaagcaggactccgtcaaaaactgggtcgagttcaagaaggagttcctgcagtacagcgagggaactctgactagggatgcgatcaaaagggagctggatttgccccagaaagagggggagcccctggatcagttcctctggcgcaagagagacctgtaccagaccctctatgtggatgcagatgaggaggagatcatccagtacgtggtaggcaccctccagcccaaactgaaacgtttcctgagctaccccctgcccaagaccttagagcagctgatccagagggggaaggaagcccaaggtaacatggagcactctgaggagcccagtccacagaggacccctgaggttcagccgggagactccgtggagactgtgcccccctcaaccaccgccagtcccgtgccgagcaatgggactcaaccagagccccccagccccccagccactgtcatatgagctcccctcaagggggtctgggttccgtggaagggagaagggggcttatttaggaagcttctccttggagggaagttctggctgagacgagacctgaggagtgctcagtccaacagcccagagcagagggattggctttgctcctggggggagggaggtggtgggggagaggcaccccaggatggggctgcccccctcacccaggccgtgccatgctgtggtgctggggaccctgctggcaccactgcggggaacagccaattttatgagaattccctgacaagaaactagagacaattcccaacttgtgaagcggctgctcggcactggcagctctcaaggacttcatacgagtgcagcagttggtggagggttcctacccaactggatctctccttttccttctctcctccctcctccaagagggtggccctgtcctgaggagacagctttctttttgacccttgcctgtttttgattaacctctgggtttctgttcacttggtgatctcctgctcttacttgctccaaaggattaaagtaattttttaaattattttttggtttaagagggaaaaaaatcctattatttcaggaactgaaagctttaagaatctggattattttctgtggttttcatttcactgcacctaatacctgctttaatgtgtttcctcttaagaggctcttactggtttactccttgtcttgagtttctgctcactctagtttcaaggccactgcagtgcagaggcagatttcatcctttctctgcacattatcctgtgcattcagcaggaaacagatcttctaattaaattttgagctcatttattgaaagagcagtctccttcctttcagagaagagagggtgttcaaggtagagagaggagacaccagagctcttttgagagagactgggggggggagggaaaggaaataaataaggatttattttaaggatttgaatgaaacaaacaaacacaccctaaattcagagcaaaatatccccagagcagcaaattgagtccatgctgatgtgtggagacaacaggagcttttgccatgtaaaagccaaaagaagtgaagagaggatctgtgtgccccagcacagttttagcctgtgcattgctgcaaggagtttctgctcacacagacagactccaaatgctcctggaaagcctggcacctctgtcctggagcagcagaggacagagtgttgtccgctcacagaggaattcctgcaacatctcgccacagatggagatggacttggactttgtgactttttccatgttgagacaggaaacgctcagcactcacctttggccagtgcttggtgacaggactgagaggagaaagacattcctgaagtttggctctccaaagcttcccgaggctggacacatcttgggcatcatctgcatccaccagcagaccaaataaacagcagggatgcagcagcaggagtgaccctgggatgctcctggcactgccacagtggtgacacgtggcactggtggctcgcaaggcctttgctgagactccttccaagaggctgaaggtaaggaagctctctggcattccctcctcagagctaaactggtcatggaatgtccaacagaaaacttgccctgggataaaaactcagctgataaaaactcagctgaaatgggatacaaagcattggggctgggagaaaggggaagggagagacagccaaagggaaatacaggaatgggaaaagtttctaaagagggcagtatcctgcacttgctgattaaatgggaaaagaatgagaagcttcttaattagcccagccccagaacctgccttgtgcttcatggggaacctctgggcttgagtcctcagctgaggcagcacatcccaggtccatgcacagcccagaggagctgcagctctgctctgcatccttgctgggagctggtctcaggaatggtgggagctctcctctcacttgttcccagtttgtcaacagctctgcatgcagaaaaaggatcatttctcactaatgacccgggctgagtgatgggggagtgggagtcactgctgaggatgagctggccgtgtattacaagctttgtctcctcttgcttccagtgactcactcagatcctcctctgagaaggaatcacttcgcagcatgcagcatttgggaggaaagccacagaaaaagctgcaaaacaaaggcctcaacttcagacctgctctcaggaccctcagccaccaacagccagatccaccgcctgaaggaaagattggcacaggtaattacatcccatattactttgtgggtctgccttaatctccccagtgccctgacctgagatattgaacagcccaagtgcaaaaagctgtgctggtcttgaaacctcagtcccaggcgctgcagcagcctggcaccaccagagaggtgggatttcagctccttggtgtcagaatccaagcgccagccccagtaattgatgctccagggactgcacactgtggctttcccttggctggaccatgggcaaatccttaaaaccccaacacatggtgggtcctccaggctgcaggcacagcaaaatttaatcccaaatcctgagaattcccccttactccccacttcaaaaatctcatcagagttggtgcattttttttttcttttccagcaattcctgctgctgttgctgagattccttctctgtgtccaagagctttcccaggggagaagaaagtgctgcaggaagacagagggcaaatcatgcaccaaagagcctcccatgcagtgcaatgcaaacattcaaggtgctgagagccagaatgaaactgggaagctgcttccagcagtacaaagaaaagcctgagctggtccagctactccaagcacagaaggaagtgctgagaatggagagagaggccagaacagaagaaccaagtccaggctttggagacagtggggatgctgggcttgtgctgactgtctgtggagaggattctgcacctctgcagtctggggccgctgggactcacctcaagaaatcttcactagaaaatgatcctcactgaaaaaaaactttcctgattaactttgccaaggggctgatcctgccttggctacgaaccctccccgctggccatgctgtaactcacctctcctgagtcgtctcatgcgggtatcagttccaaacctcaaagggctcccggagtttggagaagcatcccacggtccagatgcttgtctgaactgttggagcctgcacatctgggccagctgtcttgccagcaaggagcctcgtgagacagcaggtgctctctgggtctgcatgggccagagttactgcaagaactggggttcttgtgctggctttggagtgactgtttccatccagacccagggagcccaaaaagagctcgagtgagctggacaagacagttttggttcatctctcagccgaagaggtccagttggttcctctctcttccagagccaactgtcctgtgtgtgggtgtgggtgtgggtgtcagtgtgggggagtgtgtgtgtgtgttgagcaaaaaaaatccacattacttaaattctgtggtgttttgttgcatttgaattaagccagagggacctaaggcacattccaacaaggctcagcaaaaatgtccaggactggaaaattccgtaaaaccatgtaaagacagattcccaggcatcatcttaaggtctaaatgatgtttgatttttgaggtgcttaatttccacagtctcttccaagggactagactgcctcaataggcattttatttttcctgctttttttagggaattagcctgtctgtgctacttggtcatttagtcctgagttttttcacattttcagctggctttttggagtgtgcagaactgaatttcctggactgatttgatttcaattgttgctcccagcaaattggagctttacttgtagcaccctggtttttattaccagcctctccaggaaggactggtagtttattttcctaggcagagtcatgtgaatgagaagtgtggatgtgttgtacctctggaactttagcagatatcaaccactgcatttttttttcctccctaggcgattttgcatttactgatgaaactatctttagagtttttatttttactagagatattattaattcaagcaaccttgtgcaaaaggcaaacacgttgaatcgctgcaggttgtaggggttgaagccaaaaggtctttgtaagccgacatcacctgccctggatctgactggatcaggcagtttattcctcatgtgtcatgttggagttacaagatcacaccaagccactagagcctgtcagtagaatagtgcaacactcgatttgctattgtagcaaagccttttgtagatttatacaataaaactttgaagtatctgcttcaattgc

SEQ ID NO: 72 - DNA, 1185 bp, Talpa occidentalis
atggagctggaccgcatggccggcggcggcctccacgcctaccccgggccgcggggcgcgccggccgccaagcccaacgtgatcctgcagatcggcaagtgccgcgcggagatgctggagcacgtgcgcaggacgcaccggcacctgctgaccgaggtgtccaagcaggtggagcgcgagctcaaggggctgcaccgctcggtgggcaagctggagagcaacctggacggctacgtgcccgccggggactcgcagcgctggaagcgctccatcaaggcctgcctgagccgctgccaggacaccatcgcgcacctggagcgctgggtcaagcgcgagatgcacgtgtggcgcgaggtcttctaccggctggagcgctgggccgaccgcctggaggccatgggcggcaagtacccggtgggcgcggagcccccgcaccccgtctccgtgggcgtgggcggccccgagggctactgccgcgaggccgacccctacgactacagcgtcagcccctacgccatcaccccgccccccgccgccggggagctgccgggccaggagcccgacgacgcccagtacccgccctgggcgcccggcgaggacgggccgctgagcccgggcgtggacacgcagatcttcgaggacccgcgcgagttcctgagccacctggaggagtacctgcggcaggtgggcggcaccgaggagtactggctgtcccagatccagaaccacatgaacgggcccgccaagaagtggtgggagttcaagcagggctcggtgaagaactgggtggagttcaagaaggagttcctgcagtacagcgagggcacgctgtcccgcgaggccatgcagcgcgagctggacctgccgcagaagcagggcgagcctctggaccagttcctgtggcgcaagcgggacctgtaccagacgctgtacgtggacgcggaggaggaggagatcatccagtacgtggtgggcaccctgcagcccaagctcaagcgcttcctgcgccacccgctgcccaagaccctggagcagctcatccagaggggcatggaggtgcaggacgggctggagcaggcggccgagcccgccgcgccccgcctggccgccgaggacgaggccgaggccctcacgcccgcgctcaccaacgagtccgtcgccagtgaccggaccccgcccgagtag

SEQ ID NO: 73 - DNA, 1825 bp, Falco rusticolus
gaagcagctcttgcatctctagtgaaagcatttttgactcgccaagtttacccgaggagaaatcagcaggatttttgcagcagcctccagcttctctgtgcatatctgtgtgtttttctccagcggggactctctgccgttcaagactctcagctccggatgagcaggtagcgggcacgcgtgtggggctggatgtcttagccaactcctgtccttgttcctggaggatcctggctctctctgggacaccctgagcacgtgagaccggcgtttccagctaggcactgggaaaaatttgcctacaactctctctgggatccacggggaccaaacgtcttgctctgcggtgatatctgatttggttgtgtttgtgtgaaaaagtcctttgaggggggtttaggagtctctgtgtgtctttcagaaagtgttgtggtgggttttttgggagccaggtctagtgccagggtttacaacagtcttttccgtgtttgaaactcgcacagtcagagccatgcagttggataatgtcaccagtgcaggcatccactctttccaggggcaccgtggagttgccaacaagcccaatgtgatcctgcagatagggaaatgcagggcagaaatgttggagcatgtcaggaggacccaccggcacctcctgtctgaggtctccaagcaggtggagcgcgagctgaaaggcttgcagaaatcagtggggaagttagagaataacttggaggaccatgtcccaactgataaccaaagatggaaaaagtccatcaaggcctgcctggccagatgccaggaaaccattgcccatctagagagatgggtcaagcgagagatgaatgtctggaaggaagtctttttccgtctagagaagtgggcagaccgtctggagtccatgggaggcaaatattgccctggggaccatggcaagcagactgtgtccgttggggtgggaggcccagagatacggccaggtgagggggagatttatgactatgcccttgatatgagccaaatgtatgcactgacccctcctcctggggaggtgcccagcatcccccaggcccatgactcctaccagtgggtctctgtgtcggaggatgctccagcctccccagtggagactcaggtctttgaggatccccgggagttcttgagccacttggaggaatacttaaagcaggtgggtggaacagaggagtactggctgtctcaaatccaaaaccacatgaatggcccagctaaaaagtggtgggaatacaagcaggactctgtcaagaactgggttgagttcaagaaggagttcctgcaatacagtgaggggactctgactagggatgctatcaaaagggagctggatttgccccagaaagagggggagcccctggaccagttcctttggcgcaagagagacttgtaccagaccctctatgttgatgcagatgaggaggaaattatccagtatgtggtaggcaccctccagcccaaactgaagcgcttcttgagttaccccttgcccaagaccttagagcagctgatccaaagagggaaggaagtccaaggcaacatggaccactctgaggagcctagcccacagaggacccctgaaattcagtcaggagattctgtggacagcgtgcctccctcaaccactgccagtcctgtgccgagcaatgggactcaaccggagccccctagcccaccagctactgtcatatgagctagtccaagggatgcagcggtctgggttacatgaaagggagaagggggcatatttaggaagcttctccttggagagaggttctggctagagacgaga

SEQ ID NO: 74 - DNA, 3366 bp, Artibeus jamaicensis
ggacccagagcgactcagcctccgctgccccgcagccagactcggtgctgccggtgcgcccgtacctgcgcacggccggaccccaaagccccaccggccctagagcagttcgcagcccggcgccaccctcttgtcccagcacctgcgcgcaaatggagctggaccacaggacgagtggtggccttcacgcctaccccgggcctcgaggcgggccggtggccaagcccaacgtgatcctgcagatcgggaagtgccggactgagatgctggagcatgtgcggaggactcaccggcacctgctggcggaggtgtccaagcaggtggagcgcgagctgaaggggctgcacaggtcggtgggcaagctggagagcaacctggacggctacgtgcccgccagcgactcccagcgctggaagaagtccatcaaggcctgcctgtgccgctgccaggagaccatcgcccacctggagcgctgggtcaagcgtgagatgcacgtgtggagggagatcttctaccggctggagaggtgggccgatcgcctggaggccatgggcaccaagtaccaggtgggcagcgaccccgcccgccacccggtctccgtgggcgtcgggggtcccgaggcctgcggccaggaggccgacggctacgactacacggtcagcccctacgccatcaccccgccacccgctgccggcgagctgcccgggcaggaactggaggaggcccagcagtacccgccctgggagcctggcgaggacgggcagcccagcccgggcgtggacactcagatcttcgaggacccgcacgagttcctcagccacctggaggagtacctgcgacaggtgggcggctctgaggagtactggctgtcgcagatccagaaccacatgaacgggccggccaagaagtggtgggagtacaagcagggctcggtgcggaactgggtggagttcaagaaggagttcctgcagtacagcgagggcacgctgtcccgggaggccctgcagcgcgagctggacctgccgcagaagcagggcgagccgctggaccagttcctgtggcgcaagcgggacctgtaccagacgctctacgtggacgccgaggaggaggagatcatccagtacgtggtgggcaccctgcagcccaagctcaagcgcttcctgcggcacccgctgcccaagaccctggagcagctcatccagaggggcctggaggtgcagggcggcctggagcaggcggcggagccggccagcccccagccccccgctgaggacgaggccgaggctgaggccgagaacgaggctgagaacgaggcgctcacgccggccctcaccaacgagtctgtggccagcgaccggacccagcccgagtagagggccttccggccctgcctgcctgccacaccccgcctgtggcctttaccaaccaggacttttgagttgggctgacccccgcagggggcgcccttgtcccaccctggtggacgctcccgctagcctcccagcctgattcacacagcacatgccacccagttctggacagcgtcccccatgcagtgaaggagcccccgtcccctgcagcaccggcctcgtcccccgacctccgtctgtcttccagggcctgggcccgcctgggccaccaggccccacccccacccagcacacacactctcaggccctgacagcgtcccggcctcctcatcccgctccgcacctgggccctctgcgcactcgtgagccccagtggctccggccagcacgcaccacgctcgggggacaccccgagcagaagcgaaagcacacccggtgcccagtgccgtgggacctcagctcccggccagcaccccctcctggcagttgccacacaggccagccagcccacctcggacagcacagtgtggctccgtgtcctaaggatgcccgaagcccaggcgcagcctcagcagcagcagcagcagcagcagacctggcctccccatctcctggcctctcaggtgagcccctgcatcagggcactaccactaggggtcaccacagagctcggagggcccagggccaagtccctgttccaggccagcccacagagcctcagcagcgccccagcaagttagcctcaggggctggggtgggggtgggggtggcaccgtggggaggtgggaaggagcagagaccacagggccagggggaggggctaggtgggaggtgggctgggggaggctgctgagccagctctcacagctccgggcgtttctctcccccagccctgtccgtgactcacgccagctcacacggtgactcagccgtggcaggcagggggtccccaggagcctgagtcctccaaccagctgaggcagcagccggtgtccccggagccaggagattgacaacaggtaatggagccccaacccccccaccgagaccctgaccctccactgtcctccccaggggcctttgggtccctccccaggcccaggccctgccccagccccaggcctctggacgagctgggtggcagcccaccagggtccccaaggctctggccccagggagcagccctgttcttcccttcctgcctgcagcccctgccacctaccctgtccctgaccaccctgtgtcttcctttcaggtcccaaggctcacccagagccctgctgctgtgcccggcactgcccactgctctctcctcccaccggctgcctgcacgggaggagatgaccgaggcccaagaggggatgctgcagagaggaggggcccgggagagccggcgctgaagatgcccagcctgaaggccagggcccgccgctctgcccgcctcgccggccgccagcccgctggcccccagggcctctgtggccggagtcctggtccgacaccctgggcccgccttgctccggcccagcagccctgggcactgtgcggcctcctcccccgccagggcttcctgagagcccggcccagaggccgagaggccagccccaggacaccccaaagtccgactcctggggctccggctggctctctgccagccgccgctgcccaggccctgaccgccccctcagcaccataccctggtgctgcagagcagggtctgtttgggggtccctgttctgcctgtccactggaggttcccagatcccagattccagagcatctgcaggtgactgttggctccttcactctgtacccctgccggccccccaaattttatttttacacatgagccataacccatcctctcaggctgctgggggccccgggtcccctgcccccatacaccaagcctggagggcctggccaggctggggcccccctccttgaagacagacccttttataaggttttgttaataaaacgccgagaactggtg

SEQ ID NO: 75 - DNA, 2021 bp, Sturnira hondurensis
gccttcctgcgctgccgccttccagagctgctgctgccgccgcggcaccagacccagagcgactcaggctccgctgccccgccagactcgttgctgccggcgcgcctgcacctgcgcacggccggaccgcgaagccccaccggcccaagaggactttgcagcccgccgcctccctcttgtcccagcacctgcgcgcaaatggagctggaccacaggaccagcggcggccttcacgcctaccccgggcctcgaggcgggcaggtggccaagcccaacgtgatcctgcagatcgggaagtgccggactgagatgctggagcacgtgcggaggactcaccggcacctgctggcggaggtgtccaagcaggtggagcgcgagctgaaggggctgcacaggtcggtgggcaagctggagagcaacctggacggctacgtgcccaccagcgactcccagcgctggaagaagtccatcaaggcctgcctgtgccgctgccaggagaccatcgcccacctggagcgctgggtcaagcgtgagatgcacgtgtggagggagatcttttaccggctagagaggtgggccgatcgcctggaggccatgggcagcaagtaccaggtgggcagcgacccggcccgccacaccgtctccgtgggtgtcgggggtccggaggcctgcggccaggaggccgacggctacgactacacggtcagcccctatgctatcaccccaccgccggctgccggtgagctgcccgagcaggagctggaggacgcccagcagtacccaccctgggggactggcgaggacgggcaacccagcccgggtgtggacactcagatcttcgaggacccgcacgagttcctcagccacctggaggagtacctgcgacaggtgggcggctctgaggagtactggctgtcgcagatccagaaccatatgaacgggccagccaagaagtggtgggagttcaagcagggctccgtgcggaactgggtggagttcaagaaggagttcctgcagtacagcgagggcacgctgtcccgggaggccctgcagcgcgagctggacctgccgcagaagcagggcgagccgctggaccagttcctgtggcgcaagcgggacctgtaccagacgctctacgtggacgccgacgaggaggagatcatccagtacgtggtgggcaccctgcagcccaagctcaagcgcttcctgcggcacccgctgcccaagaccctggagcagctcatccagaggggcctggaggtgcagggtggcctggagcaggcggctgagccggccagcccccacccccctgctgaggacgaggcggaagccgaggctgagaatgaggcgctcacgccggccctcaccaacgagtctgtggccagtgaccggacccagcccgagtagagggccttccggcccctgcctgcccgccacaccccacctgtggcctttaccaaccaggactttgagttgggctgacccccgcccgggggagccctcgtccccacctcggtgggcgctcccgctagcctcccagcctgattcgcacagcacatgccacccagttctggacagcgtccccccgcgcagtgaaggagccctcatcccctgcaggaccaggccttgtccccctccccccgtctgtccttccagggcctgggcctgcctgggccaccaacccctacccctacccagcacacacactctcaggccctgacggcggtcgccgtctcctcatcctgctccgcacctgggccctctgggcactcagaaaccacgagccccagtggctccggccagcaggcaccatgctcgggggacaccctgagcagaagcgaaagcgcacccggtgcccagtgccgtgggacctcagctcccggctggcccccctcctggcagtcgccacgcaggccagccagcccacctcggacggcacagtgtggctccgtgtcctagaggactcccgaagctcaggtgtagcctcagcagaagcctcagcagcagcagcggcggcagca

SEQ ID NO: 76 - DNA, 4804 bp, Manis pentadactyla
gggggatgactgtgcatgcggggggctatgagtgtgcatgcggggggctatgagtgtgcatgtggggggctatgagtgtgcagcgtgagagtgggagagggaagctggcagcaggccctaaggtgatccaccacctgctggtggctgtgggcagtggtgtgtattacctgtgcccagagaacatcagaggcccgggacccataaccatccatcctggggtagcccgggaaaggcggccctcccccaccgctgttgccaaggaggcggaaggggcctccctcccaggggaatctcagcttccggagccccattccttatatggtgctttgctgttccctgcctctcccgactgcagaagtcggccggcaccccttccctgcctccctccgcccttcctcttagaagtcttggagcttccgaccaggtgccctcagtggcctggggggtttcagggcccagcaccctgcagtgggctgcaggacccctccatctcctccacagcccaactccccccgcgccccccacccccaccaaagcagcttccagatttctctggaggagagaaatgtaaagtcttgggcctcactaaagacctgggagtggggcaccaggcagccttaaccatcgttacacaagtgtccacacatccacaccaatgccaggggcccaggcagagccaaggcttgggtgcgtccctcaccaggcgcagaggaccagctcagggcccggattccagggcgccgggcagggggaggcagaagccggaggccacagctgggaactcacacctgacactggggagggctgcctagcgcacctgtgcatagaagcgtcctgaaagcctcgggctccagggaagaggatctgaatgtcgggtggttgccagggctcatccgtggctgaacatcctgaaaagccgactgggcaggggcaggggcagggccggtggggacccaggagagcagagcccagctccaccccacccccagtaaggagagagcggtaggaggaggaatcggaccctgggatcctgagggaggggcttcctccttacctttgggcgggggcagcgcgacaacctgtctcaggcccccgggagcccgcacccgcgcctcccggcgccgcgctggagcgtgggagggtcgcaggtcccgcaggttgaatgggcccgcgggcgggggagcgcgcattagtcaccccggctgctagtgcagggggcgggtcctcgccggcctggcgagggggcgcggggaggcggggcgcgggcgcgagcgggcgcctgggccaatgggagccgcgctcgcctaggggccgcccacgggcgcgcggcggcataaagagccccggcggcgcttgggcgcagagctcgcagctcctccgcggtctgctgcttacgtcctgctgccgccgcgccgagggtcccagcgcgccgctccgcccgacccaccgccgcaggctcccgcatctccgcacagccggtctctcaggacttcgctatccgatcgcctcggctaccggcacgcagatggagctggagcacatgaggagcggcggcctccacgcctacccggcgccacggggcggcccggcggccaagcccaacgtgatcctgcagatcggtaagtgccgggccgagatgctggagcacgtgcgccggacccaccggcacctgctggccgaggtgtccaagcaggtggagcgcgagctgaaggggctgcacaggtcggtgggcaagttggagagcaacctggacggctacgtgcccacgggggactcgcagcgctggaagaagtccatcaaggcctgcctgtgccgctgccaggagaccatcgccaacctggagcgctgggtcaagcgggagatgcacgtgtggcgggaggtcttttaccggctggagaggtgggccgaccggctggagtccatgggcggcaagtacccggtgggcagcgagccggccccccacaccgtctctgtgggcgtcggaggtcccgagggctactgccatgaggctgacccctatgactacacggtcagcccctacgccattaccccaccaccggctgccggggaggtgcccgggcaggagccagcggaggcccagcagtacccaccctgggggcctggtgaggaagggcagctgagtcccggggtggacacccagatctttgaggacccaagggagttcctcagccacctggaggagtacctgagacaggtgggtggctctgaggagtactggctgtcacaaatccagaaccatatgaacgggccagccaagaagtggtgggagttcaagcagggctccgtgaagaactgggtgcagttcaagaaggaattcttgcagtacagcgagggcacgctgtcccgagaggccatgcagcgcgagctggacctgccgcagaagcagggagagccgctggaccagttcctgtggcgcaagcgggacctgtaccagacgctgtatgtggacgccgaggaggaggagatcatccagtatgtggtgggcaccctgcagcccaagctcaagcgcttcctgcgccacccgctgcccaagaccctggagcagctcatccagaggggcatggaggtgcaggacggcctggagcaggcggccgagacggccagcccccacccgcccaccgaggacgaggcggaggccgtcacgccagccctcaccagcgagtccgtggccagtgaccgaacccagcctgagtagagggcagcccaggccccggcttgcccaccacagcccaatggcctttgccagctggactttggagctgggatggctcctgaactggggggctctcatcttcctccagctgggcaccccccttgctcggcctcctagcccgacctgcgcacagacacgtcagccagatgtgggcagtatcccctaagcggcaaaggagcccctctccattgcagggcccctgcctggtcatccccctctgtctgtctgccccagtcccgaacctgccggcctgcgaccccaccctccacactctcaggcttcctcattctgctcaatgcctgggccctctgggcactcagaaaccaagtgtccaggcggcatgcccagtgtgcaccaagctcaaggaacgccccagggcagaagctaagagcagaaccagtgctgtgggaacctcggcttcggggagaccacctgcccctggaagttgccacgcagctggctggcaccctcgctgccacacacgccagctggggcagtgtggctccctcctcctgggggccaagaagccataataaatgcagccgcagccacagccgcagcaacagacctggtgtcctggtgcctcctggcccctcaggtgaggccctgccccggtgataccaccgccagggggtgctgtcaagcgggaagggcccaaagccaacttcttttctggggagcctctgggctcaaagcatccccagcaagttagtttgggggtgggatggagggcttcgcagaggcaggaaggagcagagacccagggacctgaaggggggctgatgggggaggtggggctgggggagttgctgagccagctctctcatggccccttgtgctctctcttcctcccagcaccagtgactcacgccagcccaggaaaggatcgagctccgcttgatgactcacccgcggccggcgagggtcccccagggcctgggtcctccgacccggctgaggcagcagccagagccctcggagccaggagagtgactccaggtaatggagccccatccctcccccctgaagccccgtccctcagctgtcctccagggcctgtgggctcccaccgaggccccctccgccccaccccactccctgtcccatgctctcccccagtcctctgggcaagctgccgggcagcgcaccagctcctcggggggcttccgccctgggagggttccctgcagcccctgctggcttctggccctgcccctcatggtcccattgtcttcctttcaggtctgaggttcccacggagcctctgcggctgcactgggcagtgccccctgtcctccccctacacaggaggagaggcctgcagccagcgaggaggctgcagagaggagggcctgacagagagccggtgctgaagacgggccagcgtgagggccagggcctgccactatgcccgccccgctggccgccagcccgcccgcccaccctcaaggctgctgtggctggagctggggtctgcaacctccagccctgtcttgctccagctcacaacccccacccacggtgcggccatcctctcctgccagagctttacacgagccctagggctgaggccacagcctctgcccctgctccacggccccagcctcagggcatcccggcagcctttgctcctgaggctcatgcaggttctctgccaggccctggttttgcccaggcctggacccccacttcctccggcaccaacatggtgctggctggccactcgtgtctgcagtccaagcaggccctggttgggggttctcttttctgcctatctactgaaggttcccagaaatgcaggattgtctgtaggtgaatctgcccgcccctccatcctgtgcccctgccagtccctcagattttatttttgcacataggccgtaacccatacccacaggatggcacaagctacaggaggccctggggtcctcaagagagtgtagccacccccactcctcatcccctcacagacccatctgtggatgtcaggccaggctgtgtacacccctgccaccttaacctaaagacagactcttttgtaagattttgctaataaaacactgaaacctc

SEQ ID NO: 77 - DNA, 3522 bp, Balaenoptera musculus
cggcaggctgggggcgcgggcgcggagcctgcgcccgggccaatgggagccggggctcggcgacggggccgcccacggcccgcgctggcggcataaagagccggcggccgaggctgagaggctgagcgcagagctcgggtgccgggtcctgcgggtccgcggccgccgagaccagcccgggccagccgctgttccgcgggagcctccgccacgcgcagctccgcgtagccggcgcccagccgctcctcgtcggtcccaagaggactttgcagactctgcgcccccgccgcctgtccgagcaccgccgccacctgcgagcagatggagctggaccgcaggacgaccggcggcctccacgcctaccccgcgccccgcggcgggccggtggccaagcccaacgtgatcctgcagatcggtaagtgccgggccgagatgctggagcacgtgcggaggacccaccggcacctgctggccgaggtgtccaagcaggtggagcgggagctgaagggactgcaccgctcggtgggcaagctggagagcaacctggatgggtatgtgcccacgggcgactcacagcgctggaagaggtccatcaaggcctgcctgtgccgctgccaggagaccatcgccaacctggagcgctgggttaagcgggagatgcacgtgtggcgggaggtcttctaccggctggagaggtgggccgaccgcctggagtccatgggcggcaagtacccggttggcggcaacccctcccgacacaccgtctccgtaggtgtcgggggtcccgagagctacggcaacgaggctgacacctacgactacacggtcagcccctatgccatcaccccaccaccggccgcgggcgagctgcccggacaagaggcggtggaggcccagcagtacccaccctgggggctgggagaggacgggcagccaagccccggcgtggacacgcagatcttcgaggacccgcgggagttcctcagccacctggaggagtacctgcgccaggtgggcggctccgaggagtactggctgtcacagatccagaaccacatgaatgggccggccaagaagtggtgggagttcaagcagggctcggtgaagaactgggtggagttcaagaaggaattcctgcagtacagcgagggcacgctgtcacgagaggccatccagcgtgagctggacctgccgcagaagcagggagagccactggaccagttcctgtggcgcaagcgggacctgtaccagacgctgcacgtggatgccgaggaagaggagatcatccagtacgtggtgggcaccctgcagcccaagctcaagcgcttcctgcggcccccgctgcccaggaccctggagcagcttatccagaagggcatggaggtgcaggacggcctggcgcaggtggccgagcccgccggcccccgcctgcccgccgaggaggagagcgaggccctcacgccagccctcaccagcgagtctgtagccagtgaccggacccagcccgaatagagggcgccggccccccgcctgcccgccgtggcctttgcccaccgggacttttgagcgggctgacccctgcagggggagccctcgtcctcatgcagctggacacccgcctcggcctcctagcctgactctaacagacacgtgtgattcagatgtggacagcgtcccccaaacagcaaaggggctccccttccctgcggggccctgcccctcaccctcccttggtctgtcttccccagcatgggccggcctgggccagcgaccccaccctccgtactctcaagccatgacagcggcctcgtcctgctgtgtcctggccctctgggcactcagaaacccagtatccagatggcacgggccagcaggcaccaagctcaagggacaccccagagcggaagctctggcggaaccagtgccccaggagcctgggcttctgggaagccgcctctcctggcagtcgcctcgtagccgactggcacccctgccaccgcccagggcagctggccagcctcgggcagtgtggctccctcccctggaagagagccgaagccaaaaaggcagcagcagcagtggcagcaacagacctggcgtcctggtgcctcctggcccctcaggtgagcccctgccccatggcaccaccgccagggggcgccgtagagccgggagggccccgggccaagcccactttccaggccagcccacgaggcccgggggcatccgcatccccagcaagttagcagccgggatggggtggggggtgggggacatggtggggaggcggggaaggagcagagagcccggggatcagggagagggggctggggtgggagcagggctgggggagtttgctgagccagctctcacacggaccgtgttttctctctcgcctcagcaccactgattcatgccagcctggggagggaccgagccccgctcgatgactcacccgtggcaggcggaaggtcccacagggcctgagtcctcaaatccggctgaggcagcagccggccctcggagccaggagagtgacaacaggtaatgcaggagaccccgtccctcggctgtcctcacacggggccctcaagctcctccccagcccccaggtcccaggcccccccctccagtcctctgggtgagctgagaagcagccctgggagagcagccccgtgacgtccaccgcatgtccttcccgtgcagccccttctggccttggcctgttcctgagtccctgaccatccgcgtcttccttcctttcaggtctcaaggctcctgcggagcctttgctgctgcgcctggcagtgtctcctctcctctccccctgcaagctgcctgcatgagaggagaagtctgaggccggcgagaggctggtggtgaagacgggccagcgtgagggccagggcctgccgctatgcccgccccgctggccgcccaccagcccgcccgcccccagggccgccaccccgggcccggcctcgctccagcccaggaaccgctgcccactgcgcagccatcctctcctgccagagcttgccacgaggcctggggctgaggccagagcccctgcccctacctggcggccccaagcccagccccaggagagccggcagcctttgctcctgaggttcatgtgggccctctaccaggccctgccgttgcccaggcctggacccccgcctctgccagggcaccaacaccctggtgccggccggccactcgtgtctgcagcccgagcaggcctggtgggggttcccctttctgcctgtcccctgggggttcccagcttcgggggagtgacacttacaggtgactctgccagctcccccacattttatttttgcacataagccataacccgtactcccaggctggcgcaggcagcagggaggccccagggtcctcaagagggtgtggccaactccccgtccccccaacggatcaagccctgaatgtcaggccaggctgcgtgcacccttgccaccttacctgaagacagactctttttgtaagattttg

SEQ ID NO: 78 - DNA, 1458 bp, Trichosurus vulpecula
atggagctggagcatatgagcagcgggggcctccatacctaccacggtccccggggcgggccagcggccaagcccaacgtgattctgcagatcggaaagtgccgggcagagatgttggagcacgtaaggaagactcaccggcatctgcttaccgaggtgtccaagcaggtggagagggagttgaaaggcttgcacaggtcagtggggaagctggagaacaatttggatggctatgtccccaccggggactcacaacgctggaagaagtccatcaaggcctgcctgtcccgctgccaggagaccattgcccacctggaacggtgggtgaagagggagatgaatgtgtggcgggaggttttctaccggttggagaagtgggccgaccggctggagtccatgggaggcaagtatccagtgagtggggaggccggccgccagactgtctctgttggcgtggggggccctgagagctacggccaggagactgacccctatgactacacggtgagtccctatgccatcacccctccaacaccggcaggggtcattgggggaggagaggccctaagccacgagccctcggacatacagcagtacccaccttggagctcaaccactgaggacgggacactgagtcctggtgtagacacacagatttttgaggatccccgagaattcctcagtcacctggaagaatatctgaagcaggtcggaggaactgaagagtattggctgtcccagatccagaaccacatgaatggcccagcaaagaagtggtgggaatacaaacagggatctgtgaagaactgggtggaattcaagaaggaattcttgcagtatagtgaggggaccctcacccgggatgctatcaagagagagctggacctgccccagaaacaaggggagcctctggaccaattcctctggcgtaagagagacctttaccagactctgtatgtggatgccgatgaggaagagatcatccagtatgtggtgggtacacttcagcccaagctcaagcatttcctccgacatccgctgcccaagacccttgagcagctgatccagagaggtcaggaggtccaagaaggactggagcagggggaggatgtcaccgaacagcaaacccaatcagaggacaatgatgaatccctcaccccagctattgagtcccttgccagtgatgggacccagcccgagtagaggtggtggtggccacccctcagcctttgttagccccctctccctggacacccctaccccttctgggtgtccccttctgggatcacttggttgaggattctcccagatgtcctaatttcccaagggcagcttgtgctgtcttgccaaggaagagttggcagtcagccctgtccctcagtgggattggcactttatggacttggacactttgggagataagactcatacagtaggggttttcctaccaccttccac

SEQ ID NO: 79 - DNA, 3171 bp, Pipistrellus kuhlii
agctcggcggccgcctcaccggtctcaccgctcctgcgagcctccgagcctctccgcccgccgccatccatccatccatccatccatccacccatccacccatccaccatccacccatccacccatccacccacccaccctccatccgtcctcctgcatccgccgcaccggcgcccgctcctccagccgccgccgccgccgccgccccagaggacgctccgcccgccctccggtcccctgcgccgatggagctggaccacaggacgcccgggggcctccacgcctaccccacgccgcgcggcgggccggtggccaagcccaacgtggtgctgcagatcggcaagtgccgcgccgagatgctggagcacgtgcgccgcacccaccggcacctgctggccgaggtgtccaagcaggtggagcgcgagctccgcgggctgcaccgctcggtgggcaagctggagggcaacctggacggctacgtgccccccggcgactcgctgcgctggcgccgctccatcaaggcctgcctgagccgctgccaggacaccatcgcgcacctggagcgctgggtcaagcgcgagatgcacgtgtggcgcgaggtcttctaccgcctggagcgctgggccgaccgcctggaggccgcgggcgccaagcacccggcgggcggcgagccgggccgcgccgtgtccgtgggcgtgggcggccccgagggctgctgccaggaggccgacggctacgactacagcgtcagcccctacgccatcccgccgccgccggccgcgggcgagctgccgccgggccaggcgctggaggacgaggaggcgcagcagtacccgccctgggggcccggcgaggacgggcagccgctgcccggcgtggacacacaggtgttcgaggacccgcacgagttcctcagccacctggaggagtacctgcagcaggtgggcggctcggaggagtactggctgtcccagatccggaaccacatgaacgggcccgccaagaagtggtgggagttcaagcagggctccgtcaagaactgggtgcagttcaagaaggagttcctgcagtacagcgagggcacgctgtcccgcgaggcgctgcagcgcgagctggacctgccgcagaagcagggcgagcccctcgaccagttcctgtggcgcaagcgcgacctgtaccagacgctgtacgtggacgccgaggaggaggagatcatccagtacgtggtgggcaccctgcagcccaagctcaagcgcttcctgcgccacccgctgcccaagaccctggagcagctcatccagcgcggcctggaggtgcagggcggcctggagcaggccgagcccgccgccccgcgccccgcccccgaggaggccggggcccagcccgagcccgagcccgagggcgccctcacgcctgccctcaccaacgagtccgccgtcagcgactgcgccaagcccgagtagagggcctcgccgccgtgcccgcccgcagcctctgcccaccgggactttccagctgggccgactccctcagggggacggcgcctggccgcccagcctgacccataggacacagggacagagtcccctctccctgcagcaccctgcccgtcacctccgccgtctgtcttcggggcctgggcctgcctggtccaccagaccccccccccccaagcacacactcaggtcacggcgagccagccccggctcccgcctcccgcacagcgccctgtggccagcttccccctccgagtggcatgggcagcgggcaccgagctcgggacgccccagagccgaagcggagacagcccgtgcctcggggacctcagcttcagggctgcagcgccctccggccatggctgcacagggtagccggccagcctcggacaggaccgcccactcccgtcctggaggaagcaagctgacccccaaccccaaagcagcagcagcagcagcagcagcagcagcagcagcagcgccggctcctggcccctcaggtgagcccctgcagctgggcactaaccaccaggggtcgccatagagcagggagcgcccaggccagggccatggttccaggggagcccaggaggctgggaggcgccccagccggcgggccccagggctgcgtggggcgcagagaccccgggtgagggagaggggcaggtgggaggcagggccgggggagtttgctgagccagctcacacggctcccatgttctctccccagcagcatccgtgattcatgctccagctcagcgggctgactcaccgcgcgggcagagggtcccacggccccagcccccaaacgagctgaggtggcagcgtgccccggagccaggagcacgcccacaggtaaggagccccctcccgccccggtcccttccctcagctgtccccccggggcctgcgaggcccttcccacagaccgccgcccaccccctcctgccccctgctccgctccccctccccctccggcccccctgacatctgtgtcttccttcctccaggtctcaggctccccggagccccggctgctgcgcctggcactgccccctccccccccacgagctgccgcccaggagatgcctgcggccagcagaggggggtgcggagaggagaccccgaggagagggaccccgagagagcggtgctgaagacaggccggctgagggcaggccgccaggtgcccgccccgccggctgccagcccgcgggccccaggcctcggtggctggagtcggggtttgctactcaggccccgactcactccagcccggaacccgccgccgtgtggccaccggctcctcctgccgagctcccgccagccctgggcgaaggctggccgcgcaggcccctgcccggcgccccgggacgccccacgcctttgctcctgggctggagctggtctctgccaggcccgctgctgcccggcccgaccccccctccccaacacctggtgctgcctcggcctgtgtctgccgggcagggcgtgtctgggggtcccctttccgcccgtccactggggttcccggagcggggactgagctgcaggcgacactgtgcccccccgccccccccacccccctggttgcacaggagcagaacccaggcccggccaggcctccccgaagacagacccttttgtacggttttgctaataaaacactgaaact

SEQ ID NO: 80 - DNA, 6093 bp, Molothrus ater
agggaggagaagcagctctttgcatctccagtgaaagcggttttcgactcacctagtttgcccgaggagaaatcacccggatttttgctgcagcttctttgtgcatctcttgtgatttttctccagcggggactttgcggcgttccagattcccagcgggattggacatcctatccaactcctctctctctctgttcctggaggatcctggttctctctgggactcccctgaacacgtgagaccggcgtttccagcttggcaccgggagaaatttgcctacaactctctctgggatccacgtggaccgaccagctcgctctgcggtgatatctgattgggttgtgtttgtgtccaaaagtccttggaggggggtttagaagtctctgtgtgtctctcaggaagtgttgtggtggggttttttgggatccagctttagtgccaggggcttataacccagttctttctgtgtttgccactcgcacggtcggagccatgcagctggacaatgtcaccagcgcgggcgtccactccttccaggggcaccgtggagttgccaacaagcccaatgtaatcctgcagatagggaagtgcagggcagaaatgctggagcatgtccggaggacccacaggcacctcctgacagaggtctccaagcaggtggagcgggagctgaaggggttgcagaaatccgtggggaagttggagaacaacttagaggaccatgtcccaaccgaaaaccagaggtggaagaagtccatcaaggcctgcctgatcagatgccaggagacaattgcccacctggagaggtgggtcaagagggagatgaatgtttggaaggaggtctttttccgcctggaaaagtgggctgaccgcctggagtccatgggaggcaaatactgccctggggagcagggcaagcagacggtgtccgtcggggtgggaggcccggagataaggccaagtgagggggagatttatgattatgccctggacatgagccagatgtatgccctgacccctcctcccggggaggtgcctagcatcccccagggccacgattcctaccagtgggtctccgtgtcagaggatgctccagcctccccggtggagacccaggtgtttgaggatccccgggagttcttgagccacttggaggaatacttaaagcaggtgggtggaacggaggagtattggctgtctcagatccaaaaccacatgaacggcccagctaaaaagtggtgggagtacaagcaggactccgtcaaaaactgggtcgagttcaagaaggagttcctgcagtacagcgagggaactctgactagggatgccatcaaaagggagctggatttgccccagaaagagggcgagcccctggatcagttcctctggcgcaagagagacctgtaccagaccctctatgtggatgcagatgaggaggagatcatccagtacgtggtaggcaccctccagcccaaactgaagcgtttcctgagctaccccctgcccaagaccttagagcagctgatccagagggggaaggaagtccaaggcaacatggagcactctgaggagcccagcccacagaggacccctgaggttcagccaggagactccgtggagaccgtgcccccctcaaccaccgccagtcccgtgccgagcaatgggactcaaccagagccccccagccccccagccactgtcatatgagctcccctcaggggggtctgggttcattggaagggagaaagggggcttatttaggaagcttctccttggagggaagttctggctgagacctgaggagcgctcagtccaacagcccagagcagagggattggctttgctcctggggggagggaggtagtgggggagaggcgccccaggatggggctgccccccttgcccaggccgtgccatgctgtggtgctggggaccctgctggcaccactgcggggaacagccaattttatgagaattccctgacaagaaactagagacaatccccaacttgtgaagcggccgctcggcactggcagctctcaaggacttcacacgagtgcagcagttggtggagggttcctacccatctggatctctctttttccttctctcctccctcctctgagagggtggccctgtcctggggagacagctttctttttgacccttgcctgtttttgattaacctctgggtttctgttcacttggcaatctcctgctcttacttgctccaaaggattaaagtaatttttttgattattttttggtttaagaagaaaaaaaaatcctattatttcaggaactgaaagctttaagaatctggattattttctgtggttttcatttcactgcacctaatacctgctttaatgtgtttcctctcaagaggctcttactggtttacttcttgtcttagtttctgctcactctagttcaaggccactgcagtgcagaggcagatttcatcctttctctgcacattatcctgtgcattcagcaggaaacagattttctaattaaattctgagctcatttattgaaggagcagtctccttcctttcagagaaaagagggtgtttaaggtagagagaggagacaccagagctctttcgagagagactgggggaggagggaagggaaaaaaacccttattctttgaatgaaacaaacaaacacatcctaaattcagagcaaaatatccccagagcagcaaatcgagtccatgctgatgtgtggagacaacaggagcttttgccatgtaaaagccaaaagaagtgaagagaggatctgtgtgccccagcacagttttagcctgtgcatcgctgcagggagtttctgctcacacagacagactccaaatgctcctggaaagcctggcacccctgtcctggagcacctgaggacagagtgttgtctgctcacagaggaattcctgcaacatctcgccacagatggagatggacttggactttgtgacttcttccatgctgagacaggaaacgctcagcactcacctttggccagtgcttgatgacaggactgagagaagcaagacgttcctgaagtttggctctccaaagcttcccgaggctggacacatcttgggcatcatctgcatccacctccagaccaaataaacagcggggatgcagcagcaggagtgaccctgggatgctcctggcaccgccacagcagtgacatgtggccctggtggctcggaaggcctttgctgtgactccttccaagaggctgaaggtaaggaagctctctggcattctctcctcagagctaaactggtcatatagaatgtccagtagaaagtgggataaaaactcagcagaaatgggatatgaagcattggggttgggagaaaggagaagggagagccagccaaagggaaatacaggaatggaagtttcaaaagagggcagtatcctgcactttctgattaatatggcaaaagaatgggaaccttcttaattagcccagccccagaacctgccttgtccttcatggagagcctctgggcttgagtccccacctgaggcagcacatcccaggtccatgcacagcccagaggagctgcacgtctgctctgcatccttgctgggagctggtctcaggaatggtgggagctctcctctcactcgttcccagtttgtcaacagctctgtgtgcagagaaagggagcatttctcactaatgacccgggctgagtgatgggggagtgggagtcactgtgctgaggatgagctggccgtgtattacaagctttgtctcctcttgcttccagtgactcactcagatcctcctctgagaaggaatcacttcacagcatgcagcatttgggaggaaggccacagtaaaaagctgcaaaacgaaggcctcaacatcagacctgctctcaggaccctcagccaccaacagccagatccaccacctgaaggaaagactggcacaggtaattacatcccatattgccttgtgggtctgccttaatccccccagtgctctgacctgagatattgaacagcccaagtgcaaatagctgtgctggtgttgaaacctcagtcccaggggctgcagcagcctggcaccacctgagaggtgggatttcatctccttggtgtcagaacccaagcaccagccccagtaattgatgctccagggtctgcacattgtggctttcccatggctggaccataggcaaatccttaaaccccaacacccggtgggtcctccaggctgcaagcacagcaaaatttaatcccagctcttgagaatttcccctttctccccacttcaaaaatctaatgggagttggtgcattttttttttcttttccagcaatccctgctgctgttgctgagattccttctctgtgtccaagagctctctcaggggagaagaaagtgctgcaggaagacagaaggcaaaccacgcaccaaagagcctcccatgcagtgcaatgcaaacattcaaggtgctgagagccagaatgaaactgggaagctgcttccagcaggacaaagaaaagcctgagtggtccaggtactccaagtgctgagaatggaaagagaggccagaacagaagaaccaagtccaggctttggggacagcagggatgctgactgtctgtggagaggattctgcacacctctgcagtctggggccgctgggactcacctaaagaaatcttcattaagaaatgatcctcactgaaaaaaaaacaaacaaactttcctgattaactttgccagggggctgatcctgccttggctacgaaccctccctgctggccgtgctgtaactcacctctcctgagtcctttcatgcgggtatcagttccaaacctcaaagggctcccggagtttggagaagcatcccacggtccagatgcttgtctgaactgttggagcctgcacatctgggccagctgtcttgccagcaaggagccttgtgagacagcaggcgctctctgggtctgcatgggccagagttactgcaagaaccggggttcttgtgctggctttggagtgactgtttccatccagacccagggagcccaaaaagagctcgagtgagctggacaagacagttttggttcatctctcagccgaagaggtccagttggttcctctctcttccagagccaactgtcctgtgtgtgggtgtgggtgtgggtgtgcgtgtgggtgtggggggtgtgtgtgcgttgagcaaaaaaatccacattacttaaattctgtggtgttttgttgcatttgaatcaagccagagggacataaggcacattccaacaaggctcagcaaaaatgtccaggactggaaaattccataaaaccatgtaaaggcagattcccgggcatcatcttaaggtctaaattatatttaattttgaggtgcttattttcacagtctcttccaagggactagactgcctcaataggcattttattttttctgcttttttagggaattaagcctgtctgtgctacttggtcatttggtcctgagtttttttacattttcagctggctttttggagtgtgcagaactgaatttcctggactgatttgatttcaattgctgctcccagcaaattggagctttacttgtagcaccctggtttttattaccagcctctccaggaaggactggtagtttattctcctggggcagagtcacgtgaatgagaagtgtgtggatgtgttgtacctctggaattttagcagatttcaaccacttcatttttttttcctccttaggcgattttgcatttaccgatgaaactactttagaggttttatttttactagagatactattaattcaagcaaccttgtgcaaaaggcaaacgtgttgaatcgctgcaggttgtaggggttgaagccaaaaggtctttgtaagccaacatcacctgccctggatctgactggatcaggcagtttattcctcatgtgtcatgttggagttacaagatcacaccaagccactagagcctgccagtagaatagtgctacactcgatttgctattgtagcaaagccttttgtagatttatacaataaaactttgaaatatctgcttcaa

SEQ ID NO: 81 - DNA, 3698 bp, Myotis myotis
ggcagcgggatgcagagctcggcgccgctcctcactgcttccctgtgcagcacgacgagcctagctccgccgccccagccagccagccagccagccagccagccggcagtccatccatccgcaccggcgcgcccgcacctccgcaccccgccggccccgagcggactccgcagcgcgcccctccctcccgtccgagcgccgcggccacctgcgcgcagatggagctggaccacaggacgaccggaggcctccacgcctaccccgggccgcggggcgggccggtggccaagcccaacgtgatcctgcagatcggtaagtgccggaccgagatgctggagcacgtgcgcaggacccaccggcacctgctggccgaggtctccaagcaggtggagcgcgagctcaaggggctgcaccggtcggtgggcaagctggagagcaacctggacggctacgtgcccacgagcgactcgcagcgctggcggaagtccatcaaggcctgcctgtgccgctgccaggagaccatcgcgcacctggagcgctgggtcaagcgcgagatgcacgtgtggcgcgaggtcttctaccggctggagcgctgggccgaccgcctggaggccatgggcgccaagtacccggtgggcagcgagccggcgcgccacaccgtctccgtgggcgtcgggggccccgagagctgcagccaggaggccgacggctacgactacagcgtcagcccctacgccatcacctcaccgcccgccgcgggcgagctgcccggccaggagctggaggaggcccagcagtacccgccctgggggcccggcgaggacgggcagccccacccgggcgtggacacgcagatcttcgaggacccgcacgagttcctcagccacctggaggagtacctgcggcaggtgggcggcaccgaggagtactggctgtcccagatccagaaccacatgaacgggcccgccaagaagtggtgggagtacaagcagggctcggtcaagaactgggtggagttcaagaaggagttcctgcagtacagcgagggcacgctgtcccgcgaggcgatgcagcgggagctggacctgccgcagaagcagggcgagccgctcgaccagttcctctggcgcaagcgcgacctgtaccagacgctgtacgtggacgcggacgaggaggaggtcatccaatacgtggtgggcaccctgcagcccaagctcaagcgcttcctgtgccacccgctgcccaagaccctggagcagctcatccagcggggcctggaggtgcagggcggcctggcgcaggccgagcccgccggccccccgcgccccgccccggaggaggctgaggccgaggccgaggctgaggctgaggccgaggaagccctcacgccggccctcaccaacgagtccgtggccagtgatgggacccagcccgaatagagggcccggggccggcccacccgcccgcccgccacgcccgcctgtagtagcccttgccaacccggacttcccagctgggccgactcctcgggggacagcccttggcctcccagcctgatccacatggacacacagttacggacagtgtcccctctccctgcaggacctgccctgccacctcccgctgtctgtcttctggggcctgggcctgccccctccagacccctcaccccccaacacacactcacactcaggtcatgacgagtcccacctcccccctccgaacggcacggcagcgggcaccgagctcaggacaccccagagccgccgcgaagacacagcccgtgccgcggggacctcggctgcggggctgcggcccctcccggcagtggccgcacgggcagccggccagcctcgcacaggacagccgggctccgtcctggaggaaactgaagctgaaccccagcctccgcagcagcagcagcagcagacctggcccccacctcctggccctcaggtgagcccctgcagctgggcactaccaccaggggtcgctgtggagctgggagggcccaggccaagtccatggtccgggcgagccgaccaccatggtctcagtggcttagagacaccccaaccagtccgccaccgggctgagtgggggcgcagagaccccggggtgagggagaggggcaggcgggaggcagggccgggggagtttgctgagccagctcacacggatcctgtgttctctccccagcagcatctgtgattcatgctccagctcagctgggtgactcaccacgcgggcagagggtcccacgggccccagtcctcgaaccagctgaggcggcagccgtgtccacggagccaggagagtgaccacaggtaagggagccccagccctcccgctcaggaccttccctctgctgtcctcactaggggcctgcgaggcccttcctacagaccctccgccccgccctctccccgccctccgccctccgccccgccccgccccgccctccgccctccgccccgccctccgccctccgccccgccccccgcccctccgccccgccctccaccctccgccccgccctccgcccctccgccccgccctccacccctccgccccgccctccgcccctccgccccgccctccaccctccgccccgccctccgcccctccgccccgccctccgcccctccgccccgccctccacccctccgccccgccctccgcccctccgccccgccctctccccgccctccgccctccgccccgccccgccacgccctccgccctccgccccgccctccgccctccgccccgccctccaccctccgccccgccctccgccctccgccccgccctccgcccctccgccccgccctccacccctccgccccgccctccgcccccgccccgccctccaccctctgccccgccctccgcccccgccccgccctccaccctccgccccgccctccgccccgccccgccctccgccccgcccctgacgcccagtgtcttccttccctccaggtctcaggctccccggagccccggctgctgcgcctggcactgcccgcccccctctcctccacaagctgcccgccaggaggagacgcctgaggcccgcgaggggggctgcggagaggggaccccgaggagagcggtgctgaagacaggccggcgcgagggccaggctgccacgtgcccgccccgccggccgccagcccgccgggccccagccactgcggctggagctggagttcgctacccaggcccgactcctccagcctaggaacccgcccactgcgtggccatccgctcccctcccgctgagcttcccgcccgccctgggctaaggccgcggcctccgctcctgcgcccggccggtggccccaggacgccccaagcctttgctgctggggctcaagctgcgctctgccaggccccgctgctgcccaggcccgacccccacctccccgacaccaacaccctggtgctgcccgcgacttgtgtctgcctagcgggtcctgtttgggggtccccttcctgcctgtccactgggggttcccaggttcggggaccgacagctgcaggtgacactcagcccctccaccccgtgcccttgccacccccaccctcaggtttaagtttgcacatgagccataacccatgtcccaggctgcagggccctccctgaagacagactcttttgtaagattttgctaataaaacactgagacttg

SEQ ID NO: 82 - DNA, 1188 bp, Molossus molossus
atggagctggaccgcaggacgaccggcggcctccacacctaccccgcgccgcgaggcgggccggtggccaagcccaacgtgatcctgcagatcggtaagtgccgaaccgagatgctggagcacgtgcggaggacccaccggcacctgctggccgaggtgtccaagcaggtggagcgcgagctgaaggggctgcacaggtccgtgggcaagctggagaacaacctggacggctacgtgcccacgggcgactcccagcgctggaaaaagtccatcaaggcctgcctgtgccgctgccaggagaccatcgccaacctggagcgctgggtcaagcgcgagatgcacgtgtggcgggaggttttctaccggctggagaggtgggcagatcgcctggaggccatgggcagcaaggagccggtgggcagcgagccggcccgccacactgtctccgtgggtgtcgggggccccgagagctgctgcccggaggccgagggctacgactacacggtcagcccctacgccatcaccccgccgcccgctgccggccagctgcccgggcaggaggagctggaggacgcccagcagtacccgccctgggggtccagtgaggacgggcagccgaaccctggtgtggacactcagatcttcgaggacccgcacgagttcctcagccacctggaggagtacctgcggcaggtgggcggctccgaggagtactggctgtcccaggtccagaaccacatgaacgggccagccaagaagtggtgggagttcaagcagggctccgtgaagaactgggtggagttcaagaaggagttcctgcagtacagcgagggcacgctgtcccgggaggccttgcagcgcgagctggacctgccgcagaagcagggcgagccgctggaccagttcctgtggcgcaagcgggacctgtaccagacgctgtacgtggacgcggacgaggaggaggtcatccagtacgtggtgggcaccctgcagcccaagctgaagcgcttcctgcgccacccgctgcccaagaccctggagcagctcatccagaggggcatggaggtgcaggacgacctggagctggcggctgagcccgctggcccccagccccccacggaggacgaggccgtcacgccagccctcaccaacgagtctgtggccagtgaccggacccagcccgaatag

SEQ ID NO: 83 - DNA, 3512 bp, Onychomys torridus
cagtgcagtgctcgggcgactagtcctccagcaactgcagtctctgggcctcaccggcttcagcaccggcgcgccagccgctctcgcaccaccgcgcaccaccgcgcacctgccactgccgctccgcgcccaccgacgccgccggctctgctgccttcccgcttctgccccagaggagttcgcagcctgtccagagcctcagcacctgcgagcagatggagctggaccatatgacgaccggtggcctccatgcctatcctgcccagcggggcgggccggcagccaagcccaatgtgatcctgcagatcggtaagtgccgagccgagatgctggagcatgtgcggaggacccaccggcacctgctgaccgaagtgtccaagcaggtggagcgagagctgaaagggttgcacaggtcggtgggcaagctggagaacaacttggacggctatgtgcccaccaatgactcccagcgctggaagaagtccatcaaggcctgtctgtgccgctgccaggagaccattgccaacctggagcgctgggtcaagcgtgagatgcacgtgtggagggaggtcttctaccgcctggagaggtgggccgaccgcctggagtccatgggcggcaagtacccagtgggcaacgagccggctcgccacactgtctctgtaggtgtggggggtccagagccctactgccaggaagctgatggctatgactacaccgtcagcccctatgccatcaccccaccacctgctgccggagagctgcctgatcaggggtcagttgaggcccagcaataccagtcttgggggtcaggtgaggatgggcaaccaagcccgggtgtggatacacagatcttcgaggacccacgggagttcctgagccacctggaagagtacctgcggcaggtgggtggctctgaagaatattggttgtcccagatccagaaccacatgaacgggccggccaagaagtggtgggaattcaagcagggctccgtgaagaactgggtggagttcaagaaggagtttctgcagtacagcgagggcacgctctctcgtgaagccatccagcgggagctggacctgccgcagaagcagggcgagccactggaccagttcctctggcgcaagcgggacctgtaccagacactgtacgtggacgctgaagaggaggagatcatccagtatgtggtgggcaccctgcagcccaagctcaagcgctttctacgccacccactgcccaagactctggagcagctcatccagaggggcatggaagtgcaggatggcctggagcaggcggctgagccttctggcaccccactgcctacagaagatgagaccgaggccctcacacctgcccttaccagcgagtcagtagccagtgacaggacccaacctgaatagaggggccagcccggggtccccagcctgcctgccacacccagcctgtggcctttgccaactcggacttgagctggggctgattcccaaaggggtgccctgtccagccagacatctactcacccccctggcctgactcacagacaactgccacacaaccatgctacccggtcgacatcaagaagcccctctaccgcagggctcccacctgccacccacccctcagcggtttgccctggccctagtcccactggccttaccctccacactctcagaccatcacagaacacctttggcttcctcgttctgcgccagtgcccgagtcctttgggtaatcgggaaacaagtgtctggaaggcaaagagcagtaggcaccacaccccaaggggcatcccagggcagaagctagagcagaatcattgccgagagaaccttgacttcagggaatgcagcctgctcctatggacacagcagatccagctggtaccctagctgcctcccagggcaactggccaaccttgggcagtatagctccccccccacccccgtcaggggtgagctaaacccacaaatgcagctgaagcagccagcagacctgacatcatggcacctcctggcccccaggtgagccctgcgccgtgtatctagagttgggggtgagggacagagctaagtccattttccgggaagccctcggggcttctccagcaaagtagatgcagggatgggatggagcggccatcagggtggatgccatcatagtggacactggtactccagggatagaggaggggagggctgaggagggggtggtcctgggggagtttgctgagccagctcacagggaccctatgccttctcaccccagcagtgattcataccagcgaagaaaagcagagctcagctccatgactcagccgtggcaggcggagggtcccagaggggctgagtcctcacacccagctgaggcagcagctggcaccttcagagccaggagaatgatatcaggtaagggagtcttgcctcctgccctgaccaggccccagaccccagccactctggatctctgggttttctgagaagtcctgacgggtacaaggggcaccggctggggacagggtgacctactgtccctcgcagacgtcaggatgagcagtcctctaacccaccttgctgcttcttgtcttcctcaggtctcaaggctgctgagaagtcttccttgccatgcctggaatgggcaccaccacagcacgggcactgtctcctcctctctcgaagctatcagcgcacaagttccaagatactttcagggctgagaaaacatgattacaagagaggagggggcctggcagagggcagcactccaacccagcctgagagctggaggtgaagataggccagcgtgaagccagggtctgccgtgatgcccaccccgctggccactcgctgcccgccatgagccactgcagcttgagcagggtctgtgctcctaggcctcttagcatagaacccagctcgctgagtggccgttggtcctcgccagaacctcgcaggagccttaaggcttgggccccagcccagcccatcctttcctgctgtgccctgccctgctagtccaagcccagtctcaggagaccccaggccttggttcctgggatgttccaggcacttccctgcccagttatggcccagctgagccccagccatgccccagcaccactgcctcgtgctggtagctgcttgtgtctgcagtccgagtaagccttgtcgaggttcctccatctgcctggtccgctggtgttctgggaccagttcctctgaagttctgacagatcctctgtcctgtccccctgccgggccccacagctttgttttttcacataagccacgacccatatgcatttggcttacacaggagggaggcccctggggactagggagaccccgaagatctcaaagagagtgtggctatcccctatttccgccaagccttgaaaatccagccaggccatctgtccataccatcttacctcgaagacagacttttatatagatatatagatatatatgcatacatataagattttcttaataaaaccatgaaatttc

SEQ ID NO: 84 - DNA, 3450 bp, Halichoerus grypus
gggtgcagagctcggcgccgcggctctccgctcttcaccgctcctccgcgctcttccgcgctctgtcgccgccgccgccgctgctggaccgaagggaccgtcctggctccaccgcacagccggtccacgaggacttcgcagcctgccgcctctcgccagtccgatcgccgcggccacctgcgcacggatggagctcgaccacatgacgagcggcggcctccacgcctaccccgggccgcggggcgggccggcggccaagcccaacgtgatcctgcagatcggtaagtgccgggccgagatgctggagcacgtgcggaggacccaccgacacctgctcaccgaggtgtccaagcaggtggagcgggagctgaaggggctgcacaggtcggtggggaagctggagagcaacctggacggctacgtgcccaccggcgactcgcagcgctggaagaagtccatcaaggcctgcttgtgtcgctgccaggagaccatcgccaacctggagcgctgggtcaagcgggagatgcatgtgtggcgggaggtcttctaccggctggagaagtgggccgaccgcctggagtccatgggcggcaagtacccggtgggcaatgatcccgctcgccacaccgtctccgtgggcgtcgggggtccggagggctactgccaggaggcggatggctacgactacaccgtcagcccctacgccatcaccccgccgcctgccaccggcgagctgcccgggcaggagcccgtggacgcccagcagtatccgccctgggggcccggtgaggacgggcagcccagccccggtgtggacacgcagatcttcgaggatccgagggagttcctcagccacctggaggagtacctgcgacaggtgggcggctccgaggagtactggctctcgcaaatccagaaccacatgaacgggccggccaagaagtggtgggagttcaagcagggctctgtgaagaattgggtggagttcaagaaagagttcctgcagtacagcgagggcacactgtcccgggaggccatccagcgggagctggacctgccgcagaagcagggggagccgctggaccagttcctgtggcgcaagcgagacctgtaccagacgctctatgtggacgcggaggaggaggagatcatccagtacgtggtgggcaccctgcagcccaagttcaagcgcttcttgcgccatccactgcccaagaccctggagcagctcatccagaggggcatggaagtgcaggatggcctggagcaggcggccgagcccgcgggcccccgcctccccaccgaggatgaggccgaggccgaggccgaggcgctcacgccagccctcaccaacgagtctgtgaccagtgacccgacccagcccgaatagaggccagcccgggccccagcctgcccaccacaccccgcctgtggcctttgccaaccaggactgtcgagctgggctgagtcctgcacagcggagcccctcatcctcacctggctgggcacccaacctcagcctcccagcctgactcacacagacacatgtcatccagctgtgggcagtatcccccaaacagcgaagggcccctgccccgtcaccctccttctgtctgtctttcccggtctctgaccccatcctgcacactctctggccaccccaggacctcccagcttcggtattctgctcaacccgccgggccccctgggcactcagaaatcaaacgtccagatggcccaggccagtgagccccgagcccaagggacaccccagggcagaagctaaaacatcagcagcaccccaggaaccttggctttggggcgccgccttcccctggcagttgctgggcagccggctggcactcttgccgccgcccagggcagccggccagccgcaggcagcgaggctccctcctgctgccgaaagccagagcctctggagcgaccgaccactgcggcggcagccccgcgacggcagcagcagacctggcgtcctggtgcctcctggcccctcaggtgagctccggccccaaggcacccccgccagggggcactgtggggtagggagggccccggggccaggtcagccccagcaggttagctgcagggatgggttggggggggggctgcagcggggagttgtggggaaggagcagagaccccagggatcggggagaagggccgggctgggcggcggggcggtgggacggtggagccggctctcacacgaccccgtgctctctctctcctcagcaccagtgattcaccccagcctggaaaaggatcggctgggctggatgactcacccgcagccgggggagggtctcacagggcctgagtcctcaaactcagctgaggagccaggagagtgacgacaggtacagcccgctctctccactgagaccctgtccctgcttcccccccccgcaggatcccaggcccggtgccccccaacacagtgctctgggcaagctgagaggcagcccagcatggcggcttggccctgggggagcagccccgtagtgtccatcccgtacccctcctgtgcagcccctcccagcctgtggcctctctgaccacccccccaccctgtctttctttcaggtctcaaggctcccacagagccttcgctgcggcgcctggcgtgcccctccctctcctcctgcaagctgcccacacaaggagacgctgaggtccgcagaggagctgcagagagggtgggcccggcagagagctggtgatgaagacgggccagcgtgagggccagggcctgccgctaggcctgccccgctgaccaccagcctgcctgcccccatggccgctgtggctggaggcggggtctgctacctcgggccctgtctcgctccagcccaggaacccttgcccacggcacggcggccatcctctcttgccagagctttccaggagctctgaggctgaggccccagccccagcccctgcccgcagccccaggcccagccccaggagatcccagaagccttgcacctggggctaaggcaggctctctgccaggccccgccatagctggggcccagacccccacctcccccggcaccaacgccccggtgctggccggccactcgtgtctgcagcccgagcaggccctggctgggggttctcctttctgcctgtccagtgggggttcccagattcaggggactgatggctgcaggtgactctgtcagcccctccatcctgcacccctgccagccccccccagattttatttttgcacataagccataacccatactcataggctggcataggctgcagggaggccctggggtcctcaagagggtgtgaccagtccccccccgtccccagcgggtcaggccttcagtgtcgggccaggctgtgtgtacccctgtcaccttacctgaagacagactcttttgtaagattttgttaataaaacagtgaaacttc

SEQ ID NO: 85 - DNA, 1215 bp, Cygnus atratus
atgcagctggataatgtcaccaatgcgggcatccactccttccaggggcaccgtggagtggccaacaagcccaatgtgatcttacagatagggaaatgcagggcggaaatgttggagcacgtcaggaggacccaccggcacctcctgtctgaggtctccaagcaggtggagcgtgagctgaagggcttgcagaaatcggtggggaagttagagaacaacttagaggaccacgtcccaaccgataatcagagatggaagaagtccatcaaggcctgcctggccaggtgccaggagaccatcgcccatctggagagatgggtcaagagagagatgaatgtttggaaggaggtctttttccgtctggagaagtgggcagaccgcctggagtccatggggggcaaatattgccctggggaacacggcaagcagactgtgtccgttggggtgggaggcccagagataaggccaagcgagggggagatttatgactatgcccttgatatgagccaaatgtatgctctgacccctcctcctggggaggtgcccagcatcccccaggcccacgattcctaccagtgggtctccgtgtcggaggatgctccagcctccccagtggagacccaggtctttgaggatccccgggagtttttgagccacttggaggaatacttaaagcaggtgggtgggacagaggagtactggctctctcagatccagaaccacatgaacggcccagctaaaaagtggtgggaatacaaacaggactctgtcaagaactgggttgagttcaagaaggagttcctgcagtacagcgaggggactctgactagggatgctatcaaaagggagctggatctaccccagaaagagggcgagcccctggaccagttcctctggcgcaagagagacttgtaccagaccctgtatgttgatgctgatgaggaggagattatccagtacgtggtaggcaccctccagcccaaactgaagcgcttcttgagttaccccttgcccaagaccttagagcagctgatccaaagagggaaggaagtccaaggcaacatggaccactccgacgagcctagcccacagaggacccccgaaattcagtcaggggactctgttgagagcatgcctccctcaaccaccgccagccccgtgcccagcaatgggacacaacccgagccccctagccctccagctactgtcatatga

SEQ ID NO: 86 - DNA, 6304 bp, Oxyura jamaicensis
gactagtggcagttcagacagggaagagaagcagctctttgcatctctagtgaaagcgcttttgactcgccaagtttaccggagaagaaatcatcaggatttctttttttttttttcttttcttttctttttttttttttttctttcttttgcggcagcttccagcctctgtgtgcatcgctgtgtgtttcaaccgagcggggactcttcgtcgttcgagattctcagctccggacgagcaggtagcaggcacgcgtttggggctggacatcttagccaactcctctcctcattcctggaggatcctggctctctctgggacaccctgagcacgtgagacaggcgtttccagcagggcaccgggagaaatttgcctacaactctctctgagatccacggggaccgaacagctcactctgcggtgatatctgatttggttgtgtttgtgtcaaaaagtcctttgaggggggtttagaagtctctgtgtgtctttcgggaagtgttgcggtgggggttttgagagcaggctctagtgccggggcttacaacccagtttttttctgtgtttgacacttgtacggtaggagccatgcagctggataatgtcaccaacgcgggcatccactccttccaggggcaccgtggagtggccaacaagcccaatgtgatccttcagatagggaaatgcagggcggaaatgttggagcacgtcaggaggacccaccggcacctcctgtctgaggtctccaagcaggtggagcgcgagctgaagggcttgcagaaatcagtggggaagttagagaacaacttagaggaccacgtcccgaccgataaccagagatggaagaagtccatcaaggcctgcctggccaggtgccaggagaccatcgcccatctggagagatgggtcaagagagagatgaatgtttggaaggaggtctttttccgtctggagaagtgggcggaccgcctggagtccatggggggcaaatattgccctggggaacatggcaagcagactgtgtccgttggggtgggaggcccagagataaggccaagcgagggggagatttatgactatgcccttgatatgagccaaatgtatgcgctgacccctcctcctggggaggtgcccagcatcccccagggccatgattcctaccagtgggtctccgtgtctgaggaggctccagcatccccagtggagacccaggtctttgaggatccccgggagtttctgagccacttggaggaatacttaaagcaggtgggtgggacagaggagtactggctgtctcagatccagaaccacatgaacggcccagctaaaaagtggtgggaatacaaacaggactccgtcaagaactgggttgagttcaagaaggagttcctgcagtacagcgaggggactctgactagggatgctatcaaaagggagctggatctaccccagaaagagggggagcccctggaccagttcctctggcgcaagagagacttgtaccagaccctgtatgttgatgccgatgaggaggagatcatccagtatgtggtaggcaccctccagcccaaactcaagcgcttcttgagttaccccttgcccaagaccttagagcagctgatccaaagagggaaggaagtccaaggcaacatggaccactccgacgagcccagcccacaaaggacccccgaaattcaatcaggggactctgtagagagcatgcctccctcaaccaccgccagccccgtgccgagcaatgggacacaacccgagccccctagccctccagctactgtcatatgagctagtccggcggagatggcaatctgggttacgtgaacgggagaagggggcgtatttaggaagcttctccttggagagaggttccggctgagccgcgacacgaggtgagctcagtccaacagcccatagcaaaggaatcaactttgcttgtggggggagggaggcaaagggggagaggcaaccttaggatgtggttgcccacctcacccaagccacgccacacggtggtgccggggatgctgcttgcaccactgtgggggacggacaattttataagacccatgacaagaaaccagagacaattcccaacttcagaagcagccgcttggcactggcggctttcaaggacttctgacgagtacagctattggctgagggttcctacccatctggatctctcctccttctcccctccctctcgtgaagaggttctgagaggacatctttcttttgaccctcgcccatttccaatttaccgctgggctttttttttttttttttttttttttttttacttggcaatctcctgttctgtctcgctttaaaggataaaagatttttatttatttatttattttgtttaattaagaggaaacctgatgacttcaggaaatgagaaccttaagaatctgggcaatgtttagtgtttttaatttcggtgcacccaatacctgctttaatgtttttcctcccaagaggctggtttactccttatcttagtttctgctcactccaatcaaggctactgcagtgcagtagcaaatttcaccctttctctgcgcattacactgtgcattcagcagtaaacagagttccaaattaaattctgggttattttattggagggagaatgagtctcctttcagagaagagagggtgtcaaggtggagaaagaaagcaagcaccagagctattttgagagggggggggggggggggagttaggggaaacaaatccttatactttgaatgaaacaaacaaacacagccaaaattcagagcaaaatatccccagagcagtgaattgtgtccatgctgatgtgtggagacaacaggaacttttgccatataaaagcaaatcaaagtgaagagaggagctgtgtcccagcacagcctcagcctgtgcatcatgaagaagaatttctgctttcacagacagactgaaatggtcttggaaagcctggcacctctgtcatctgaggagaaagagctgcctgttcacacagaattttctacaacagcccctttgccatggatggagatggacttggactcagtgatatttgccatggtgcgacagcaatgctcagtgtctgccttgctttgatcaaggtatgataggactttgagaagaaattgctgtaaaatgcaggaagtttggctcttcaaaacctcgaggctggacacatcttgagcatcatctgcattcaccaccagaccaaataagcaacacctctgcaggagatacatcagggatgcagtgacaggagtgtccctgggatgtccctggcactacaacagcagcgatgtgtgacaccatcagcttggaaagcctttggcatgcctccttccaagaggctgaaggtaagacaactttctgatgttgtcctctctgcactcttcaggcctaaattaaccttagcctgtctagtaggataaatgggacaggagcactgtatgtggcagactaaggcatggaggaaagggagggacaaccaaagggaaataaaagacagtggataggaaaagtttccaaacaggatagcatcttacactttctaattaatagagggagggaatgggaaggaactggcccatgaagccgtgggcttgagtacccagcagtgacaacacatcacagcccaaaggagaggcacctctgctctccatccttgcctagaagtgagtcagtgtcaggaggagtgagggctctcccctcacttgttcagagtgagttagcttgcagtggctgtgtctgcagaaagaagggagcagttctcaccaatgacctgggaatgagtggtggaggagtgggtgtcagtgctgaggatgagctggccgtgcattacaagcattatcttctcttgattacagtgactcactcagagcctcctctgagaagaaatcacttcatggtgctcaggtctcggaaggaaagccaaagagaaaagacttcaaaaccaaggattcaacatgggacctgctgccaggatccccagctgccgagtgccagatcctctgcctgactgaaagcctggcacaggtaattacctcccatcttaccccagagagcctttcttagcctccccagtgtcctcaggcaagatatgggatagctcaggtcttggggctggtcttgggacctcaggcccgatggctacaaggggctggcaccatcagataggcgggatttcagcttaatgtgggaacacaagcaccagccccagtgatcagtgttctggggacagagcgtgtcctgccttcctttctgctggacctctggcaatccttagataccactgcctagtgggacctccgggcctcaggcacctggtgggcacaccagttgaatattaacttatatcctgaaaaatcccctgtattctctgtaaaacttctttggagactttggaaatctaacctgagctgctccatttatttatttttttttctctaacagagattcctgctgctgttgctgagtttcctcctctgtgcccaagacacctgctttcccaggtgaaaagcaagcactgctggaagacagagggcaaaatgtgcaccaaagagccaaccatgccgtgcaatgttgtattcaagatgctgagagccggaatgaaagcgggagccacttccaacagggcgaagaaaaggctgagctggttcaactagtccaagagcagaagaaagtgctgagaaagaaaagagaaaccaagagaaaagataaaccaagagaaccaggtctgggctttggggacagcaaggatgctggacttgtactgactgtgtgtcgagatgatgccatacctctgcagtttggggccactgggactcacctaaagaaatcttcactagattaacagattaaaacaacaacaaaaaaaactttcctgattaactttgccaaatgactgaccctccctaggctacgaaccctccatgctgttaaggctgtaactcatatttcctgagtcgagggtcgcttcatttcatgcgggtatcagttttcaaacctcaaacagctctggaggttcggagaagcatcctggggtccagatgcttgtctgaactacttgagcctgcacaactgggccagctgtcttgccaaaagggacacttgtgagacagcaggcgcttcctggatctgcatgggccagagttactgcaagaagcggtgctcttgtggtggctttggcgtgactgcttccatacagacccagggagcacaaaaggtgcacaagagacaacagctagagtgagttgaaccaagcctttttgcaagacagttttggttcacatctcatttgaagggatcctgttggttcctctctcttccagagccaagggtcctgggtatgcgtgtgcttgtcagtgcgggtgtgcatgtgtcgagcgatcagatccacttaaccaaattctggggagttttgttgcatttgaaccaagccagtgggatgtcatgcacattccaacattgctcagccaaaaatgttcaggaccagaaaattatgtgaaaccatgtaaaaacagacttcataggtatcatcccaaggtcaaaatgaagtttgattttgaggtgcttaatttccacagtccctctcaagggatctgactgcctcaatgggtattttcaatgtccatagactttcctgccttttctatgagttatcctgcctgaactacttgattatatggtcctgagctttgtacattttccactgactttgtggagtgtgcacaactgaacgcccttggctggttttatttcagttattgctcctagctgattggagctttacttgtagcaccctggtttatattaccagcttctccaggaaggactggtagtttgttttcctggggtagagtcacgtgaatgaagaagtgtgtatgtgctgtgtctgtgaaactttagcagatttcaaccactggagattttctttttttttccttaggtaattttacatttgactctgacagaactactttagagtttttatttttactagaaatattagtaattcaaacaaccttgtacaaaaggcaaactcactgaatgactacaggttgtaggggttgaagccaaaaggtctttgtaagccgacatcacttgccctagatctgactgtatcaggcagttattcctcatgtgtcatgttggagttacaagatcacaccaagccactagaacctgtcaatagaatagtgctacactttatttgctattgtagcaaagccttttgtagatttatacaataaaactttgaaatatctgcttcaa

SEQ ID NO: 87 - DNA, 1224 bp, Zootoca vivipara
atgcagttggacaacatcaaccaggtgaacctccactccttccagggtcaccgtggcgtggccaataacaacaagcccaacgtgatcctccagatagggaagtgcagggcggagatgctagaccacgtcaggaggacccaccggcacctcctgaccgaggtgtcaaagcaggtggagcgggagctgaaaggcctgcagaagtcggtggggaaactcgagaacaaccttgaggaccatgtcccctcggctgctgagaaccagaggtggaagaagtccatcaaggcctgcctgtctagatgccaggagaccattgctcacttggagaggtgggtcaagagagagatgaatgtctggaaggaagtgttcttccgcctggagaagtgggctgaccggctcgagtctggtggggcgaagtattgccatggggacaaccacaggcaaactgtctcggtaggggtgggaggcccagagatcaggcccagtgaaggggagatttatgattatgctctagacatgagccagatgtatgccctgacacctcctccttccggggatgtccctatcgtgcctcagtcccatgattcctaccagtgggtctctgtctcagaagatactccaccttccccagtggagacccagatttttgaggaccccagggagttcctgactcacctggaggactacctgaagcaggtgggtggcactgaggagtactggctctctcagattgagaaccacatgaatgggcccgccaaaaagtggtgggagtacaagcaggactccgtcaagaactggctggagttcaaaaaggagttccttcagtatagcgagggcaccctgaccagggatgccatcaagagagagctggatctccctcagaaggatggagaacctctagatcagttcctctggcgcaaaagggacctgtaccagaccctctacgttgatgctgaggaggaggaggtcatccagtacgtggtagggaccctccagcccaagctcaaacgcttcctcagccacccttaccccaaaactttagaacagctgattcagaggggcaaggaagttgaggtcaactatgacaactctgaggagcccagtccccagaggacccctgagttaagggactcattggaaagcatccctccctccaccactgccagccctgttgctagtgatggaactcaacctgaggtttctgtcccaccgaccacagtgatatga

SEQ ID NO: 88 - DNA, 3302 bp, Mirounga leonina
gccggcggcggctgcaggctgcagagctccgcgccgcggctctccgctcctcgccgctcctccgcgctcctccgcgctctggcgccgccgctgccgccgctggaccgaagggaccgtcctggctccaccgcacagccggtccacgaggactttgccgcctgccgcctctcgccagtccgatcgccgcggccacctgcgcacggatggagctcgaccacatgacgagcggcggcctccacgcctaccccgggccgcggggcgggccggtggccaagcccaacgtgatcctgcagatcggtaagtgccgggccgagatgctggagcacgtgcggaggacccaccgacacctgctcaccgaggtgtccaagcaggtggagcgggagctgaaggggctgcacaggtcggtggggaagctggagagcaacctggacggctacgtgcccaccggcgactcgcagcgctggaagaagtccatcaaggcctgcttgtgtcgctgccaggagaccatcgccaacctggagcgctgggtcaagcgggagatgcatgtgtggcgggaggtcttctaccggctggagaagtgggccgaccgcctggagtccatgggcggcaagtacccggtgggcaacgacccggctcgccacaccgtctccgtgggcgtcgggggtccggagggctactgccaggaggcggatgcctacgactacaccgtcagcccctacgccatcaccccgccgcctgccaccggcgagctgcccgggcaggagcccgtggacgcccagcagtatccgccctgggggcccggtgaggacgggcagcccagccccggtgtggacacgcagattttcgaggatccgagggagttcctcagccacctggaggagtacctgcgacaggtgggcggctccgaggagtactggctgtcgcaaatccagaaccacatgaacgggccggccaagaagtggtgggagttcaagcagggctctgtgaagaattgggtggagttcaagaaagagttcctgcagtacagcgagggcacactgtcccgggaggccatccagcgggagctggacctgccgcagaagcagggggagccgctggaccagttcctgtggcgcaagcgggacctgtaccagacgctctatgtggacgcggaggaggaggagatcatccagtacgtggtgggcaccctgcagcccaagttcaagcgcttcttgcgccatccactgcccaagaccctggagcagctcatccagaggggcatggaagtgcaggatggcctggagcaggcggccgagcccgtgggcccccgcctccccaccgaggacgaggccgaggccgaggccgaggcgctcacgccagccctcaccaacgagtctgtaaccagtgaccggacccagcccgaatagaggccagcccgggccccagcctgcccaccacaccccgcctgtggcctttgccaaccaggactgtcgagctgggctgagtcctgcacagcggagcccctcatcctcacctggctgggcacccaacctcagcctcccagcctgactcacacagacacatgtcatccagctgtgggcagtatcccccaaacagcgaagggcccctgccccgtcaccctccttctgtctgtcttttccggtctctgaccccatcctgcacactctctggccaccccaggacctcccagcatcggtattctgctcaacccccagggccccctgggcactcagaaatcaaatgtccagatggcccaggccagtgaaccccgagcccaagggacaccccagagcagaagctaagacagcagcagcaccacaggaaccttggctttggggcgccgccttcccctggcagttgctgtgcagccggctggcgctcttgcgctgcccagggcagccggccagccgcaggcagcgaggctccctcctgctgccgaaagccagagcctccggagcgaccgaccgctgcggcggcagccccgcgacggccgcagcagacctggcgtccgggtgcctcctggctcctcaggtgagccccggccccaaggcacccccgccagggggcactgtgggggagggagggccctggggccaggtcagccccagcaggttagctgcagggatgggttgggggcggggggggggctgcagcggggagttgtggggaaggaatcggggagaagggccgggcggggcggcggggcggtgggacggcggagcctgctctcacacgaccccgtgctctctctctcctcagcaccagtgatccaccccagcctggaaaaggatcgctgggctggatgactcacccgcagccgggggagggtctcacggggcctgagtcctcaaactcagctgaggagccaggagagtgacgacaggtacagcccgctctctccactgagaccctgtccctgctccccccaccgcaggatcccaggcccggcgccccccaacacagtgctctgggcaagctgagaggcagcccagcatgggggcttggccctgggggagcagccccatagtgtccatcccgtacccctcctgtgcagcccctcccagcctgtggcctgtctctgaccacccccccaccccgtctttctttcaggtctcaaggctcccacagagctttcgctgcggcgcctggcctgcccctccctctcctcctgcaagctgcccacacaaggagacgctgaggtccgcagagttgctgcagagagggtgggcccggcagagagctggtgatgaagacgggccagcgtgagggccagggcctgccactaggcctgccccgctgaccaccagcctgcctgcccccacggccgctgtggctggaggtggggtctgctacctcgggccctgtctcactccagcccaggaacccttgcccacggcacggcggccatcctctcttgccagagctttccaggagctctgaggctgaggccccagccccagccctgcccgcagccccaggcccagccccaggagaccccagaagccttgcacctggggcttaggcaggctctctgccaggccccgccatagccggggcccagacccccacctcccccggcaccaacgccccagtgctggccggccactcgtgtctgcagcccgagcaggccctggctgggggttctcctttctgcctgtccagtgggggttcccacattcaggggactgatggctgcaggtgactctgtcagcccctccatcctgcacccctgccagcccccccccccagattttatttttgcacataagccataacccatactcataggctggcataggctg

SEQ ID NO: 89 - DNA, 2170 bp, Trachemys scripta elegans
gacagtagcagttccgacagggaagcgaaggagctctttctcgctttcactggcacttggcactcgaagttaacagcagattggaaattgctaggatcttagcaagcagcttctagctgtgtgtgtgttcgtgcagagggaactctcagccgatcaagatcccgcactcaggacgaggagcagcagacaccagagatcccaggccgggactccctctctttcccagacgctcaccgccgtgacggcgtcacccgaggcacgtgggacctgcgcgctgggaacggcctgaacgaatttgccaccgactcctgctggctgcaaaggggactggacagctctccttggggtgatatctgactcggttgtgtttgtgtgagacatccttggggaggcaagagagggcggtgtgtgcctttcgggagaggatttaaaagcagggcgggagtgttactaaattaaaagccccgggtaaccactagggctttatcactagctctgttgcattgctgcttggtttagcctgttcacgccacaggtaccatgcagctggatagcatcaccaatgggagcgtccacaccttccaggggcaccgcggagtagccaataagcccaacgtgatcctgcagatagggaagtgcagggctgagatgctggagcatgtcaggaggacccaccggcacctcctcacggaggtgtccaagcaggtggagcgggagctgaaaggcttgcagaaatcagtggggaagctagagaataacctggaggaccatgtcccatccacggacaaccagaggtggaaaaagtccatcaaggcctgcctggccagatgccaggagactattgcccacctggagaggtgggttaagagggagatgaatgtctggagggaggtgttcttccgcctggagaaatgggcagaccggttggagtctatggggggcaaatatggccccacggaccatgccaggcagactgtctccgtcggggtgggcggcccggagagcaggggcaatgacggggagatttacgattatgcccttgacatgagccagatgtatgcactgactccctctcccggggagataactagcatgccccagccccacgactcctaccagtggatcactgccccggaggacgctccggcctccccagtggagacccagatctttgaggacccccgggagttcttgagccacttagaggaatatttgaagcaggtgggagggactgaggagtactggctctctcagatccaaaaccacatgaacggcccagctaaaaagtggtgggaatacaagcaggactcggtcaagaactgggtggagttcaagaaggagttcctgcagtatagcgagggcactttgaccagggatgccatcaaacgggagctggatctaccccagaagcagggggaacccctggacgagttcctctggcgtaagagagacctgtatcagacactctacactgatgcagaggaggaggaaattatccagtatgtggtaggcaccctccggcccaaattcaagcgcttcctgagtcaccccttgcccaagaccttagagcagttgatccagagggggaaggaagtcctaagtgactttgaccagtcagaagagccgaccccgcagagaaccccagagcatcagccaggggactcggttagtagcttgccaccttcaaccacagctagtcccattgccagcgatgagacacaacccgagccccctaccccaccagctacggtgatatgagctagtacaagtacgggattggcctgtattatacaaaggtgtggagggggctgatttaggaagcttctccttagtgagaggttctggctgtgaccagtcatggctggactcagtccaatggccctcggcagaggaatgaactttgtttacggatgggccacgtgagaacgtagctgcctgcctcacccaagtcatgtgacaggggtgggggcaagtctgaggatacaattttaaccactgtggggtggacagttttatgatactctcggcaggaagctagacagttcccccctgcagaggcagccaccctatgctggcgcctttcaaggacttcagacaggtgcagctattgaccaagagttcccacctacccaccagtctcgtatcctctggagaggggtccccttcctca

SEQ ID NO: 90 - DNA, 1919 bp, Arvicanthis niloticus
ccggcgagcattcttctcgtagccgcagtccctgggcctctccagctcgcctgccgcactcgctaagctcctccggcaccgctcacctgccgctgtcactgccactgccgcttcgcgcccgctgcagctaccagctctgctcccttgcggcttctgcctcagaagagttcttagcctgtccgaagcctcagcaccggcgagcagatggagctggaccatatgacgaccggcggcctccacgcctaccctgccccgcggggtgggccggccgccaaacccaatgtgatcctgcagattggtaagtgccgagctgagatgctggagcacgtacggaggacccaccggcatctgttgaccgaagtgtccaagcaggtggagcgagagctgaaagggttgcacaggtcggtgggcaagctggagaacaacttggacggctatgtgccaaccggcgactcacagcgctggaagaagtccatcaaggcctgtctttgccgctgccaggagaccatcgccaacctggagcgctgggtcaagcgtgagatgcacgtgtggagggaggtcttctaccgtctggagaggtgggccgaccgcctggagtccatgggcggcaagtacccagtgggcagcgagccggcccgccacactgtctctgtaggtgtggggggtccagagccctactgccaggaagctgatggctatgactatactgttagcccctatgccatcaccccgccacctgccgcaggagagctgcctgaacaggagtcagttgaggctcagcaataccagtcttgggggccaggtgaggatgggcaaccaagccctggtgtggatacacaaatctttgaggacccacgggagttcctgagccacctggaagagtacctgcggcaggtgggtggctctgaagaatattggctatcccagatccagaaccacatgaatgggccagccaagaagtggtgggagttcaagcagggctcggtgaagaactgggtggagttcaagaaggagtttctgcagtacagtgagggtacactgtcccgtgaagccattcagcgggagctggacctgccgcagaagcagggcgagccacttgaccagttcctctggcgcaagcgggacctgtaccagacactgtatgtggacgctgaggaggaggagatcatccagtatgtggtgggcaccctgcagcccaagctcaagcgttttctgcgccacccactccccaagaccctggagcagctcatccagaggggcatggaagtgcaggacggcctggagcaggcagctgatccttctggcaccccactgcccacagaggatgagactgaggcactcacacctgctcttaccagcgagtcagtagccagtgacaggacccagcctgaatagaggggccagcccagggtccccagcctgcctgccacacccagcctgtggcttttgccaactaggacttgagctggggctgacttctaaagggatgccctgttcagctggacatctactcacccactcacaactggcctgactcacaactgccacacaaccaagctacatggaccaaacatcaagaaacccgtctcccatagggctcccacctgccacccacctctcacctgtctgccctggtcctggccccagccccattggcctcaccctctatactctcagaccatcacagaacacctttggtttccagtgtccagggccctttgggtaatcaggaaaccaggtgtctgaaaggcaatgaaaagaaggcaccaaaccaaaggaggcatcccagggcagatgctaaagcagaatcagagatgccgagggaacctcaacttctggagatgtagcccactcctacagacacagcagatccagctggtaccctagctgcctcccagcgcaactggccggtcttgggc

SEQ ID NO: 91 - DNA, 6420 bp, Pantherophis guttatus
cgaaccgaagagctctctgttttccaactctcggaggaagagaaccaaattctgcttagctcaaagttctcaggaggggtctggaagccagggagaagttgcaccagcagcggagaggtggtcttccacccgtccagaggaacctgacagatctgcttgggaattaaaagctttcaaaggcgaggaagaagaagaagtcgaggctggaaagaactttcctgatctgcttcgtgaacttttgcttcaacgccaagtggagttggacggtcacgtttttttttatttcctcgggtgacctctgattcagttgtgttttgtgcttttgggaagaagaagaagaaggcaagtcagtttctgggcagagtggtttggcaaagaattgttggaagtgtatagcagctgaggtagaaatgatgcaggtggacaacttcaaccatgggaacctccattcttgtcagggtcatcgcggggtggccaacaacaagcccaacgtcatccttcagatagggaagtgcagggctgacatgttagaacatgtgaggagaacccaccgacacctcctgaccgaggtgtccaagcaggtagagcgggagctgaaaggcctgcagaaatcggtggggaaacttgagaacaatctagaagaccacgttccttcagctgtggagaaccagagatggaaaaaatccatcaaggcttgtctggctagatgtcaggaaaccattgctcacctggagaggtgggtcaagagggagattaatgtctggaaggaagtctttttccgcttggagaaatgggctgaccggttggaatctggtgggggaaagtacagccatgctgaccaatccagacaaactgtctcggtaggagtaggggccccagaaatccaacccagcaaagaggaaatttatgattatgccttagacatgagtcagatgtatgccctgacctctcctccgatgggggaagaccctagtgtgcctcagtcccatgactcctatcagtggatcactgtttcagatgataccccaccctccccagtggaaacccagatttttgaagatcccagggaattcctgactcatctggaggactatctgaagcaggtgggtggaacggaagagtattggctctcccagatccagaaccacatgaatggccctgccaaaaagtggtgggaatacaagcaggactcggtcaagaactggctggagtttaagaaagagttcctccagtacagcgagggtaccttgacaagggatgccatcaaacaggaactggatctcccccagaaggatggggagccccttgaccagttcctttggcgcaaaagggacttgtaccaaactctctacatagatgctgaggaagaggaggtcatccagtatgtcgtagggaccctccagcccaaactcaagcgtttccttagccacccctaccccaaaactttagaacagctgatccaacggggcaaggaagttgaggacaacctagataattctgaggagcccagtccccagaggtcccccaaaaaccagttaggagggtcggtggaaagtttgcctccttcttctactgctagccctgttgctagtgatgaaactcatccagatgtctctgctccaccggtcacggtgatctgagcccagaaatcaaggcactagaaacacagatgggaactatcagcttcttcagcaggtttgtttccattcagtgggtgccttgggctacactgatgattctgggatctcagttcaaaagctggttggagatgactggcttttccttctggtatcccatgtggagaacaaagcaagcttgaactatctgatgtgcttcaagctggaacatcggtagctgagcttgaggatggctttctaaaagcaaggatcaggctatgttaccaaggtaggaaatccttcttttggggcagagacaactgaatcaccttgagtggtgactccctagggatttaaatagacaccctcacagaaggtccttccttctagcattagttctgtccttcaacatgcttttccttccagacattctctcatccttccgggtagctgttgagagatggcttctgtttatctctgcattagccaatggatttacttactttctaggaagtttctattttttaataacttcctcgacatcgtttagattgagctccaaaacacgttggaaagcaagcttcaggtgtcctggcagaacttccgctgaaaattccagccgacacttgaagctctgttgttttggcctcagttttgattctcagatgagtctctggattctctcttgacctgatttttaaggtccttcagctccagaaaagtcattagtagatacactttccacctttccatctctaaatccaagccgttgagatgagaaaggttcgtgctattgaatttcttgtttcattcatgagggcaataagcagagttctagtgaagagggagattcttaagaaacatctaagggggtttagcaaaagaaagaagactttgaggttggagggctacttagactacaagaaggaaaaaaaatgtggcacagacacagcttgaatttagaacttaacccatctacaagaatgtctactaaagttgtactaacttttgctagttgaaaaaaaaatggactgcatatttcagtggtgaggaccactttacccaaagtgtaaagacccttgaactgaagttttttttagttgagcctcctttgatgatgcaaataagaaccaaactaggaagaagatcggcagctttgagagtcttgtgccgttgaagagagaaaagagaagacaagtgaaagcaaagttcatatcatggacaattggccctttctggccgaaagagacaacttggcatgcaaaggacaagatgaagagcagctgtgaaaaatcttgctgggaaccatggggagatgtgactccttcctgtaagctagaggtaagtaacaacctcttgactttttgtctttttccaagtttaaagatgtggttgtagaggatgacaatttgggttagtttagcctggtttcacaacacgcatgaagtgaacataggttcggggttttggtggtttagcaggccttcatgctaaggcacaaggtggttgggacctagcatgaacaccagaacacctgtcaggttgtgcttttctgacgtcgcaaaaatttggggagtttgatttctggtatgaatctgctcctcaccttgctcctgccagcagcccaaagtcttttcagaatggaaggaacagtcaacattatatttagctcctctgaaaagaagaggaatggcaattgggtcgtatggcaagaagtccctttcccaaccgctgtgcataagcatttctttatctctgagagcaaaccggctgaaggacttttgtgtagatgaaataatccaattagagtttaccggggaaggaaggaagcaatagctaatataagggatgatcttctgaagcaactttagctcacacttcatgctctgcttctgttacagtgactcattcaaaaacgggctgtgaattcagcacttcctgaatcgcgtgtggagcagagattggagacggagaaacggctctggaaaagcccagcaagcaacagagctggatggacgtcatcttccccaggctcctgctgttcttgaaggacgagcgtctgaagaaagagaaggtaatttgagttctctgccagatggacaaattcctcggcctgctcttagctaacctccagatatgtctatggagattctcagtcatccaagtcatggaagtcccaaagatgccgtttttcaagaggcaactgtactttctgttttttttttctttgaaggcatttcgtatctcctccaagaagcttcttcagctcttcggttccccccaccattcagtcagagctgaagaagctccttggaggagaagcgaaatgtcttcaaagaaaaaacaagaaagtccagttgcttcttggaaaaaaaaacacctttgggacaacctctagattagaagttctgaattctcctgatacttacatacatagatctccttctgaagtgggaaggagaagcttagattcccaatttcacagcacgctttgggaaagaggtgctgggaatatctctttggggcttccttaaagaggcaagaatcaagaacatcctaccttagatactgtaggtcctacttcaaataggtcctaccaccttctcttctccagagcttttcctgcctcgtaaggaaatgatagggaatattgtacccttaactccccgattcaacctcttgccattgaccatgctggctgggatagacccctaatgactggctgggtgggggtggtcatgatgggcgtggccagggggtgtgacaggcagcactcctacaccccccaggagcaaaaacgggccatggggagggaggcactgcccccgtgccccattttgggcctagtaggccttcctgcagcctcctgaggtcaaaaatgggccatggggggcactgcccccccccccacttagggcctaggagccaaaatggggtccgtggggattcctggaaggggaggggcagggagaggccagccagccagaaatttaactaccagttcacatgaactggcctgaactggctgaatcccaccactggatagaccccaaccatgaggaaacccattaccataattctccaaagctttagcacttgcttttcttcccacttcattatcctgtcacttaatcttctctttctttcttttattattgttattatagggagttgttttcttctgttgttggtgggcatggctcctgaactcttcaacggcttcgacttttgcatgcagaagggttgttctctgaggaactgaagtaagcagcgtcaacatctcaagatgggctgctaccaagaaagcagagaagatgcaaggaagaagctgtacaaaaagcaaaaggccagcgaagggacgttcaagggactttgaagggacattcatccgttattcagatggcctcaagttatgactgtgtgaatgttgtgactgagggttggggagggaaaaatgatggaggactctggtgcaggacttcagctggaactccaaagtatctagaactgagagaacatcctttctaaaggaccacacttcattttcctgtcacctatgtggtccatgaagatgttgtaaaaaacaacaacaacaataactggagtgtttaaaaaaacaaaacaaaaatttgtagtcaaaggtgtttggttaaacaatgttaggctctataattaggagcttgacaacaatgtatgacaaatggggcaatccaactttctccactagacagcagagtaaggaatgcaatatatcttccatttcttgagcctactaagaagtgtaaaatgtacacacaccattgcatacaatggacattaatcagaactttttttgatgttcaaagaagatttgcttcacatgccacctgtcaaacaggttggattggagataggtatagattattattgtttattactattttcatcatcgtattccgcattgggcttcctaccctgaggtaggagtgactttccacgaatgtatgttcacgggccaaatttgatgacgtcatcaaattcggtgccatggttacttgaaaccttcagagccgaatgcaatgttagccatcgaataaatgatgatggttgtattaaaaatagcctgtttcatgttagtcaaaacagaaggccaacggtagactttcagtgggtctatcatgtctctttggaccttcagcacctcctgctatggcttctctggcttcacaagcaaccatgtaacaatgcttctggggttatcagagaagctgaagaagggaagtgcatggattatggattgcttctaatgagttgaattatggatcattgtttatggatcattgtttcttgactaagagagctgatgctctaattatctgtaaggagaaccggggaaagatctacccaaaccgaacggaccatcgtacctgttgtgcaatattaatccatcagatctgctgtcgactttcgatctgtttctttttgtttttaactactggaactgatctgttcaaaggaagccatgaagacaacaagtccaccactgcattgtgacagctgtggttttgatacatgggcttgggggactcaaatcacttcaaccttgttctagttgtatgacgtttcttctaccttatcacactggtggtgaaccttatgaggctgtgtcagccaattaacattagaagaagaaggaggaggaggaggagaagaaaaagcattctccacatgtaaaaggattgtagcaaaatcagtgcgttgtgaggaagcatttgtgtttgtagattcctacaataaaacattgtatgataattgcttaaaacaa

SEQ ID NO: 92 - DNA, 4797 bp, Trachypithecus francoisi
tgcagcatatatgtggctgagagagggacagggcagctggcagcggggacaaggtgtcctgattgtcagctatgatgtgctcatggccctctggctgtggggaacggtgtgtgtcacccatgcctgggtaacatcagaggacctgagacccatgcctatccagccagcactggagtaactcaggaagggcgtccctacccctgccaggttgccagggaggcagaaggggcctccctcccgagggagtctcggcttccggagccccgctccttatatggagcttggcttccctctgcctctcctgatacactgtgctgccagcaccgccctcctccctcctccctgctcttgtctccccctccccctctccttttcctccgtcctcctccctccctgtctccctctctcctcccctcttccatcttcttagaagtcttggagcctctggccaggttcttgatatagccaggggcttcagggcccagttctcttcactggaggctaatattccctccatgtcctccaaatcccagcccccccaggtagcagcttccagatttccctgggaacaccgaaaagtattgggcctcaccagagacctgggtgtgggggcacagggcaaccctgtccagtcacagccacacgggtacgtgtcaccatgcacaccaacgccagggtcaggcagagagagcctcggcctggctgtgtgtccctcacacagagcccaagacgtggactcgggaccacctgggcaggggtggtaggagttcaaagccgcatctaggagctcacatgtgtgcgtgtagagttgctgagtccctgggcacaggaggctgatcgggagggtccttcccgggctgagctgcacatcctgcacagctgggtggacagggtcaggggtagtgaggacccaggagagcagtggccagcgccagccccctccagccccgcaaagagggaggcgagtggagaggaggaagcccaccttgggaccctgggaggcaggagatgacagcccgcccagcacccaggagggggcgtgggaggggctcccagtgccaggcttcagcccctccggtccccgcaggctgaatgagctccgccgcccggggtgggaggtgcggagcggagggattagtcatcccagcccctccatgtgtgcaaggggtgggacctccagtaccttcgccgcccaggagccgagtgggcgcggggcggggcctgcaggggcgcgggcggggcgctggcggggagcctgcggctgggccaatgagaaacggggctcggcgagccggccgcccacgggccgcgctggcggcataaagagccggcggccgggactcagcgcagagctggggcgccgcgtcctccctccgcagcagcagagctggacctgcctctccgggcgcactccgccagccccgccgccggcccgcagcgacagacaggcgctccccgcagctccgcacgggacccaggccgccgggcaccgccgccggaccccagcgccctcccttcgtccgccccgaggagtttgtcgcctgcccgagcacctgcgcacagatggagctggaccaccggaccagcggcgggctccacgcctatcccgggccgcggggcgggcccgcggccaagcccaacgtgatcctgcagatcgggaagtgccgggcggagatgctagagcacgtgcggcggacgcaccggcacctgctgaccgaggtgtccaagcaggtggagcgcgagctgaagggactgcaccggtcggtggggaagctggagagcaacctggacggctacgtgcccacgagcgactcgcagcgctggaagaagtccatcaaggcctgcctgtgccgctgccaggagaccatcgccaacctggagcgctgggtcaagcgtgagatgcacgtgtggcgcgaggtgttctaccgcctggagcgctgggccgaccgcctggagtctacgggtggcaagtacccggtgggcagcgagccggcccgccacaccgtctccgtgggcgtggggggtcctgagagctactgccacgaggcggacggctacgactacaccgtcagcccctacgccatcaccccgcccccggccgctggcgagctgcccggacaggagcccgccgaggcccagcagtaccagccatgggtccctggtgaggacgggcagcccagccctggcgtggacacacagatcttcgaggaccctcgagaattcctgagccacctggaggagtacttgcggcaggtgggcggctctgaggagtactggctgtcccagatccagaaccacatgaatgggccggccaagaagtggtgggagttcaagcagggctccgtaaagaactgggtggagttcaagaaagagttcctgcagtacagcgagggcacgctgtcccgagaggccatccagcgtgagctggacctgccgcagaagcagggcgagccgctggaccagttcctgtggcgcaagcgggacctgtaccagacgctctacgtggacgcggatgaggaggagatcatccagtacgtggtgggcaccctgcagcccaagctcaagcgtttcctgcgccacccgctgcccaagaccctggagcagctcatccagaggggcatggaggtgcaggatgacctggagcaggcggcggagcctgccgtcccccacgtccctgcggaggatgaggccgaggccctcacgcctgcccccaacagcgagtccgtggccagtgaccggacccagcccgagtagagggcatcccagagcccccagcctgcccaccacatccagcctgtggctttgcccaccaatacttttgagctggggctgactcctgcaggggaagccctggtccagctgggtgccccctcgggctctgggaggactctcacacactcgtgtcatccagatgtgggcaccacagcccagcagcaaagagccctcccccctgcagggctccgcccatcgccctccctctgtctgtcttccccggcctggaccccaccctccacactctcaggccatcacagaacaccccagcttcctcattctgctacaatgcccaggccctctggacatccagaaaaccaagtgtccggatagcaggggccagcggccaccaagctcatgggacaccccagagcagaagctagggcagagccaatgctaagggagcctcgacttccggcgctgccgccctctcccagcatctgcagagccagctgacgccctccctgcctcccagggcagctggccagcctcgggcagcacggccccctccccctcctcccaggggagagcagaagtcgcagacgcagcagcagcagacctgatgtcccagtgcttcctggcccctcaggtgagcccctgccccaaggcaacacccactgtggggcatctgagagctagtgggacccggaggctgtttttgaggagagcccactgaggctcgggcccccagcaagttagccgaagggatggggtgggggtggcatcatggaagggggcatcagggagagtgggccaggtgggaggcaggggcagtttgctgagccagctctcacatggacccgtgctttctctccccagctccagtgattcacgcccgcctggagaagaatcagagctcagctcgtgactcacccatggcaggcggagggtcccagaggggctgagtcctcaaatccggctgaggcagcagctggtaccatcggagccaggagagtgacaacaggtgacagggcgccaccctcccacccagaccccaccatcagctgtcccagccaaatgagctcctccccagaccccagacaccctggggcccaggccactccccagtgctcaggcaagctgggaggctctgacagggtcgggggtcctctgccctggaagaccagcaccatccaccagccccagaccctccctgtggagccctggctactgtcctgcacggtccctcattgcacactctcctcctctttcaggtctcaaggttcccacaaagtctttgctgctgtgctgggcaccacccacccctcaccttgcaggctgcctgcatgggaggcgaagtcccgggacagcccagaggggtgctacagagaggagtcagctgcagcagagggcaggagccccagcttagccctaagcgccagcgtgagggccagggcctgtcacgaagcccgccccgctggccaccagctgcctgcccccagagccactgcagcaggagtcgggtcctgcctccctcccagcagggaaaccccgcccgctgccaggccatcctctctgccagaggctttcaggagccccaaggctggggccacagctcctactcctgcccagcagccctgagcccagctgcaggaaggagatcccagaagcctttgctcctggggctcctccaggcattctgctctgccctgacaccagaaccctggtgctggtgggccactagtgtctgcagcctgagcaggcgctggctcagggttcatctttctgccttgtccactgggggaccagccctacagaccactctgacaaatcttcagcccataccctgccagccccacagattttatttttgcacataagccataaccgatcctcacaggctggcacaggctttggggaagccctggagcctgtgaagaccctggaaacctcatgaggctgtggccgacccctgccccttacccccacacagaccaggccttaaatgtccgtccaggccctgtgtaccttaccccaaagacagactctttttgtaagattttgttaataaaacactgaaacttc

SEQ ID NO: 93 - DNA, 2618 bp, Lacerta agilis
tttccactgaatctttctcctccaatcagtggcaagatgctgatgagcacagaggcttggctacacccacatagggaggtgtgtggtgtataagtacagggatccgtctgagctagtggcacatcacagagagaaggcaaatagctctctgttttccagctaagcggaggagagagagagagattcagacacttgttagcgtgaagttctaggaagactcaaaagcagggaagcagcagcgggaacggcacgggcaacagcagaaagcattgccacttgctggggaagttctcggcagctcagctcggggattaaggactcctgggagacggaggaaggaccagacactgaagagaacttttttgtgtgtcctggactttggctgtagcacaagggcagttggacggcaagacttcccagggtgattttcttgatttggtggtgtttgtaatttgcaggggaaacaggcatttctggactgggtggttgcgacttttggagagagtctgtcaaaggggcgaaagcttgattagcccacagctaggaaacatgcagttggacaacatcaaccaggtgaacctccactctttccagggccaccgtggtgtggccaataacaacaagcccaatgtgatcctccagatagggaagtgcagggcggagatgctagaccacgtcaggaggacccaccggcacctcttgaccgaggtgtcaaagcaggtggaacgggagctgaaaggcctgcagaagtcggtggggaaacttgagaacaaccttgaggaccatgtcccctcagctgctgagaaccagaggtggaagaagtccatcaaggcctgcctgtctagatgccaggagaccattgctcacttggagaggtgggtcaagagagagatgaatgtctggaaggaagtgttcttccgcctggagaagtgggctgaccggctcgagtctggtggggcgaagtactgccatggggacaaccacaggcaaactgtctcggtaggggtgggaggcccagagatcaggcccagtgaaggggagatttatgattatgccctagacatgagccagatgtatgccctgacacctcctccttctggggatgtccctatcatgcctcagccccatgattcctaccagtgggtctctgtctcagaagatactccaccttccccagtggagacccagatttttgaggaccccagggagttcctgactcacttggaggactatctgaagcaggtgggtggcactgaggagtactggctttctcagattgagaaccacatgaatgggccggccaaaaagtggtgggagtacaagcaggactccgtcaagaactggctggagttcaaaaaggagttccttcagtatagcgagggcaccctgaccagggatgccatcaagagagagctggatctccctcagaaggatggagaacctctagatcagttcctctggcgcaaaagggacctgtaccagaccctctacgttgatgctgaggaggaggaggtcatccagtacgtggtggggaccctccagcccaaactcaaacgcttcctcagccacccttaccccaaaactttagaacagctgattcagaggggcaaggaagttgaggtcaactttgacaactccgaggagcccagtccccagaggacccctgagttaagggactcattagaaagcctccctccctccaccactgccagccctgttgctagtgatggaactcaacccgaggtttccgtcccaccaaccacagtgatatgagcagagtagtgtgaaacaggtatgacaaagaagggggttggtggattatttaggaaggtggtttcctttcatctgagaacttcagccatggtgggtctgaagatatactcagcctaatgaccggtagcaggaaaattgaattttcttcaagatcaaccatgctgagagcgtggctagcctgaatcactcaagatggttcaagctggataatggatggatcttttgaggatttcttttttaaaagccattgcaaggactggactatgtcagaaagacaaagcggcctctttgtcgtggcagaggcagccacaactcctgggggcacagcttcccagggaatttcatcgggcgtgacagaaggatttccttctcgctcacaccagtcctttccttcaaggtgcttttccttccagacattctcctccccgcttctgggaaccatcagtggactttcactaactctcttgaaagctattggtttccccctcaatctcctgcttcttccaacttttcagctgagctccaaacagattgggaaagggaacttttagcaagtttggggaggacctgaagaacgtcagcaggagtttcagccatcaaattaacccatcccctgctctcacccaactctcatgttttcatcttcaactggacctctggattctctttggctttgacttgggcattcaggtctttcagctccagaaggatcatcagccacacattcaacagtggccatgagcctgatgctttgctcctctacattctagattttgggaggataggggtttgcaagggtggggtgcctacttctcacatcaagatgctaaagagaaagaacaaaa

SEQ ID NO: 94 - DNA, 3756 bp, Rhinolophus ferrumequinum
cagtcatggggggtggtggctggtcccagcagtccctccggtcctgcaggctgaatgagccctgggaggggggtgttggagcgactggattagtcaccccaggccagcgttgtgtacagggggtgggtcctccctctgcgctctagcgcgagtgggcgcggaggcgggcccgcagagtgggcgcgcagaccaatgggaatcggggctcggcgaggggtccgcccacgggcgcgctggcagcataaagagccggcgccgcggctgctggttgcagagtctggtgccgctgctcctgcacggttctctctgcgctgcgcgggacccagtgggaccgagcctccgccgctccgccggacccaccgccaccctcgcgcccacaccgccgcacggccagatcccgcagccctcgccagtcggtcccaagaggactttgcagctcgccgcctcccgcctgagcaccgcggccacctgcgcgcagatggagctggaccacatgacgagcggcggcctccacgcctacccgggaccacggggcgcgccggcggccaagcccaatgtgatcctgcagatcggtaagtgccggaccgagatgctggagcacgtgcggaggacccaccggcacctgctgaccgaagtgtccaagcaggtggagcgcgagctgaaggggctgcacaggtcggtgggcaagctggagagcaacctggacggctacgtgcccacgggcgactcgcagcgctggaagaagtccatcaaggcctgcttgtgccgctgccaggagaccattgccaacctggagcgctgggtcaagcgcgagatgcatgtgtggagggaggtcttctaccggctggagaggtgggctgaccgcctggaggccatgggcagcaagtacccggtgggcaccgagtctgcccgccacactgtttccgtgggtgttgggggtcccgagggctaccgcaacgaggccgatggctacgactacacggtcagcccctatgccatcaccccaccaccggccgccggagaagtgccgggagaggagccggaggagtcccaggagtacccaccctggggacccggcgaggatgggcagccgagccctggcgtggacacgcagatcttcgaggatcctcgtgagttccttagccacctggaggagtacctgcggcaggtgggcggttctgaggagtactggctgtcacaaatccagaaccacatgaatgggccagccaagaagtggtgggagtataagcagggctcggtgaagaactgggtggagttcaagaaggagttcctgcagtacagcgagggcacgctgtcccgggaggccctccagcgcgagctggacctgccgcagaagcagggtgagccgctggaccagttcctgtggcgcaagcgggacctgtaccagacactgcacgtggacgcagaggaggaggaggtcatccagtatgtggtgggcaccctgcagcccaagctcaagcgcttcctgcgccacccgctgcccaagaccctggagcagctcatccagagaggcatggaggtccaggacgacctggagcgggcggccgagccggtcagctcccacctctctgccgaggccgaagccgaggctgaagccgagtccctcacgccggtcctcaccaatgattccgtggccagtgacctgacccagcctgaatagagggcatccaggccccagtcttcctgccacacacccccgtggcctttgccagccaggactttcgagcggggctgagtcctgtggtggagaaccttgtcctctttgtccagttggacaccccctcagtctcccagcctgatccacacagacacatgtcctccggttgtgggcagtgtcccccaaacagcaaaggggcccctgtcctgtcctgtcaccttccctccgtctgtcttctggggccctgggccattcatccccccccaccacacacacacacacacacacacacacacacacacacacactccctctctctctcaggcccggcttccttatcctgctcaatgcttgggccctctgggcactcagacaccaagtgtccagatggcacagaccagcgggcactaagctcaaaggacacccagagcagaagctaaggcagaaccagtgccatgaaaagctcagcttcagggccgcagccctctcctggcagtcgccacgcagggtagctggccagcctcggacagcgtgtctccctgtcctggaggagaactgaagctgaaacgcagcagtggcagccgcagacctggagtcccatctcctggcctctcaggtgaatccctgcatcatggcactaccgctaggggtcaccgtggagctgggagggcccagggccaagtccgtgttccaggccagcccaccagggctcagaggcaccccagcaagttggtggcagggctggggtgggggcagcatcgtggagaggtgtgggaggagcagagaccccaggggctgggagagggggctgggtgggaggcagggctgggggagtttgctgagccagctttcacacggaccccgtgtgttctcttgctcggtagcatccgtgattcatgccagcctggagaaggctcgagctccgctcgctgactcacccatggcaggcggaggtcccacagggcctgagtcctcaaactggctgaggcagcagccgttgtccacggagccaggagactgacaacaggtaatgaagccccatccctcccacccgagaccccgaccctcagctgtcctcaccgtgggcctgtgagtgccttcccaggactccaggtcccagtcccctgccctggtcctctggcaagctgagaggcagacccccggggtcctgaggctcagccctgggagagcagccccatgtgtcccccacaatgtccttcctatagacagcccccctcagctgccctgaccatcttgtgtcatcctttcttttaggtctcacggctcccagagagcccttgctgctgtgcctggcactgctggctcccctctcctctgcaagctgcctgcataggaggagaagtctgaggccagcgagagcaggggccaggcggagagttggtgctgaagatgggccagcatgagggccagggcctgcctctatgcccactctgctggccaccagcctgcccgcccccagggccactgtggctggaatcggggttcactaccccgggccctgtcttgctccagcccaggaactcccgcccactatgcggccatcctcttctgccagagcttttggagagccctgggaaagggctcctgcccctgcccggtggccccaagcccagccccaggagatcccaaagcctgttctcctgaggctcaagctggctctctgccaggccccgctgttgcccaggcccagacccccatgtcctccagcaccaacaccctggcgctggcccgacacttgtgtctgcagccagagcaggtcctgtttggggattcccctttctgcctgttcactgcgggttcccagacttggggactgatgtctgcaggtgactctaccagtccctccaccccatgcccctgtcagccccccaaattttatttttgcacataagccatagcacatactcacaggctggcacaggctgcagggaggtcctgggtcccctgccccccatggaccaagcctcaaatgtcaggccagcctgtgggcaaccctgccacctgccttgaagacagactcttttgtaagattttgttaataaaacactgaaacttgt

SEQ ID NO: 95 - DNA, 6011 bp, Catharus ustulatus
taagtagatggaggagcctggactagtggcagttcaggcagcgaggagaagcagctcttcagcatctccactgaaagcggtttttggctcaccaagtttttcccgaggagaaatcacccggatttttttttttttttttttgctgccgcagcttccagcttctttgtgcgtctctgtgtgattttctccggcgggggactttgcggcgttccagattcccagcgggattggacgtcttatccaagtcctctccttgttcctggaggatcctggttctctctgggacacccctgagcacgtgagaccggcgtttccagcttggcaccgggagaaatttgctacaactctctctgggatccacgtggaccgaaccagctcgctctgcggtgatatctgattgggttgtgtttgtgtccaaaagtccttggaggggggtttagaagtctctgtgtgtcttttaggaagtgttgtggtggggatttttttgggatccagctttagtgcttacaacccagttctttctgtgtttgccactcgcacggtcggagccatgcagctggacaatgtcaccagcgcgggcgtccactccttccaggggcaccgtggagtcgccaacaagcccaatgtgatcctgcagatagggaagtgcagggcagaaatgctggagcatgtccggaggacccaccggcacctcctgacagaggtctccaagcaggtggagcgggagctgaagggattgcagaaatccgtggggaagttggagaacaacttagaggaccacgtcccgactgaaaaccagagatggaagaagtccatcaaagcctgcctggccaggtgccaggagaccattgcccacctggagaggtgggtcaagagggagatgaatgtttggaaggaagtcttcttccgcctggaaaagtgggctgaccgcctggagtccatgggaggcaaatactgccctggcgagcagggcaagcagacggtgtctgtcggggtgggaggcccggagatcaggccaggtgagggggagatttatgattatgccctggacatgagccagatgtacgccctgacccctcctcccggggaggtgcctagcatcccccagggccacgattcctaccagtgggtctccgtgtccgaggacgctccggcctccccggtggagacccaggtgtttgaggatccccgggagttcttgagccacttggaggaatacttgaagcaggtgggtggaacagaggagtattggctctcccagatccaaaaccacatgaacggcccagctaaaaagtggtgggagtacaagcaggactccgtgaaaaactgggtcgagttcaagaaggagttcctgcagtacagcgagggaactctgactagggatgctatcaaaagggagctggatttgccccagaaagagggggagcccctggatcagttcctttggcgcaagagagacctgtaccagaccctctatgtggatgcagacgaggaggagattatccagtacgtggtaggcaccctccagcccaaactgaagcgcttcctgagctaccccctgcccaagaccttagagcagctgatccagagggggaaggaagtccaaggcaacatggagcactctgaggagcccagcccacagaggacccccgaggttcagccaggagactccgtggagaccgtgcccccctccaccaccgccagtcccgtgcccagcaatgggactcaaccagagccccccagccccccagccactgtcatatgagcccccctgaggggggtctgggttccgtggaagggagaagggggcttgtttaggaagcttctccttggagggaagttgtggctgagacctgaggagtgctcagcccgagagcccggagcagagggattgcctttgctcctggggggagggaggtggtgggggagaggcacctcggcatggggctgcccccctgcccaggccgtgccacgcactggtgctggggaccctgctggcaccactgtggggaactgccaattttatgagaattccctgacaagaaactatagagacaattcccaactggcggagcagccgctcggcgctggcggctctcaaggacttcatgcgagtgcagcagttggtggagggttcctacccatctggatctctctttttccatctctcctccttcctctgagagggtggccctgtcctgaggagacagctttcttttgacccttgcctatttctgattaacctctgggtttctgttcactcctgctcttacttgctccaaaggattaaagtaattttttgctttttattttttttttgttctgagaactgaaagctttaagaatctggattattttctgtggttttcatttcactgcacccaatacctgctttaatgtgtttcctctcaagaggctcttactggtttacttcttgtcttagtttctgctcacttcagttcaaggccactgcagtgcagaggcaaatttcatcctttctctgcacattatcctgtgcattcagcaggaaacagattttctaattaaattctgagctcatttattgaaggagcagtctccttcctttcagggaagagagggtgtttaaggtagagagaggagacaccagagctcttttgagagagactgggggaagggaagggaaacaaatccttattctttgaatgaaacaaacaaacacaccccaaattcagagcaaaatatccccagagcagcaaaatcgagtccatgctgatgtgtggagacaacaggagcttttgccatgtaaaagccaaaggaaatgaagagaggatctgtgtgccccagcacagttttaacctgtgcatcgctgcaaggagcttctgctcacacagacagactccaaatgctcttggagagcctggcatccctgtcccagagcacctaggacagagtgttgtctgctcacagagacattcctgcaacatctcaccacagaaggagacggacttggactttgtgacttttcccatgttgaggcaggaaatgctcagcactcacttttggccagtgtttggtgacaagactgagaggagaaagacattctccaagtttggctctccaaagcttcctgaagctggacacatcttgggcatcatctgcatttaccaccagaccaaataaacagcagggatgcagcagcaggagagaccctgggatgctcctggcactgccacagcagggacatgtggcactggtggctcagaaggcctttgctgtgactccttccaagaggctgaaggtaaggcagctctctgacgttctctcctcagagccagtagaaaacttgtctggggttaaaaactcagctgaaatgggatatgaagcactggggttgggagaaagagggagggagatcccaaggggaaatataggaatgggaaaagtttccaaagatgcagtatcctgcactttctgattaatatgggggaaaaatgggaagcttattaattagcccagccccaaaacctgccctgtccttcatggagaacctctgggcttgagtccccacctgagggagcacatcccagaggagcccagaggagctgcaggtctgctctgcatcctgctgggagctctcctctcactcgttcccagtttgtcaacagctctgtgtgcagagaaaggagcatttctcactaatgacccggctgagtgatgggggagtgggagtcactgctgaggatgagctggccctgtattacaagctttgtctcctcttgcttccagtgactcactcagatcctcctctgagaaggaatcacttctgagcatgcagcatttgggaggaaagccacaggaaaagctgcagaacaaaggccacaacatctgacctgctctcaggaccctcagccaccagctgccagatccaccacctgaaggacagactggcacaggtaattagatccctgtgggccttccttaatctgcccagtgccctgacccgaggtattgaacagcccaggtgcaaacacctcagtgccagtggctgcagcagcctggcaccaccagagaggtgacattgcagcttcttggtgacacaaccccagcaccagccccagcaattgatgctccagggtttgcacaatgtggctttcccttggctggaccatgggcaaatcctcagaccccaacacctggtgggtcctccaggctgcatgcacagcaaaatttaatcccaactcctgaaaattccccctaccttcccactttaaaaatctaatcagagttggtgtattttttttgtcttttccagcaatctctgctgctgttgctgagattccttctctgtgtccaagagctttcccaggggagaagaaagtgctgcaggaagacagagggcaaaccatgcaccaaagagcctcccatgcagtgcaatgccaccttcgaggtgctgagagccagaatgaaactgggaagctgcttccaacaggacaaagaaaagcctgagctgtgtgaggaaagtgctgagaatggaaagaggggccagaacagaagaaccaagtccaggttttggggacagcaaggatgctgggcttgtgctgcctgtctgtggagaggattctgcacctctgcgatctggggctgctgggactcacctaaagaaaactccgctagatcctcactggaaaaaaaaaaaaaaaaaaactttgctgattaactttgccaagaggctgatcctgccctggctacgaaccctccccgctggccatgctgtcactcacctctcctgagcccaggctagctccatttcatgcgggtatcacttccaaacctcagagggctcccggagtttggagaagcatccctcggtgcagatgcttgtctgaactgttggagcctgcacatctgggccagctgtcttgccagcaaggagccttgtgagacagcaggagctctctgggtctgcatgggccagagttactgcaagaactggggttcttgtgctggctttggagtgactgctttccatccagacccagggagcctgaaaagagctcgagtgagctggacaagacagttttggttcatctctctcttccagagccagctgtcctctctgtgtgtgtgtgtgtgtgtgtgtgtgtgtgtgtgcgcaaaaaaaaaatccactttacttaaattctgtggtgttttgttgcatttgaattaagccagagggatctaaggtacattccaacaaggctcagcaaaaatgtccaggactggaaaattccataaaaccatgtaaaggcagattcccaggcatcattttaaggtctaaatttgattttgaggtgcttaatttccacagtctcttccaagggactagactgcctcaataggcattttattttttcctgcttttttagggaattagcctgtctgtgctacttgctcatttggtcctgagattttttcacattttcagctggctttttggaatgtgcagaactgaatctcctggactgattttactttaattgttgctcccagcaaactggagctttacttgtagcaccctggtttttattaccagcctctccaggaaggactggtagtttattttcctggggcagagtcacatgaatgagaagagtggatgtgttgtacctctggaactttagcagatttcaaccactgcatttttccctccctaggcgattttacatttactgatgaaactactttagagtttttatttttactagcgatattattaattcaaacaaccttgtacaaaaggcaaacacgtggagttgctgcaggttgtaggggttgaagccaaaaggtctttgtaagccgacatcacctgccctggatctgactggatcaggcagtttattcctcatgtgtcatgttggagttacaagatcacaccaagccactagagcctgtcagtagaatagtgctacacttgatttgctattgtagcaaagccttttgtagatttatacaataaaaatttgaaatatctgcttaaattgattcaa

SEQ ID NO: 96 - DNA, 3478 bp, Rattus rattus
tagtcctccctcagccgcagtctctgggcctcttcagcttgagcggcggcgagcctgccacactcgctaagctcctccggcaccgcgcacttgccactgccactgccgcttcgcgcctgctgcagccgccggctctgattccttctggcttctgcctcagaggagttcttagcctgtcccgagccgtaaacccggcgagcagatggagctggaccatatgacgaccggcggcctccacgcctaccctgccccgcggggtgggccggccgccaaacccaatgtgatcctgcagattggtaagtgccgagctgagatgctggagcacgtacggaggacccaccggcatctgttgaccgaagtgtccaagcaggtggagcgagagctgaaagggttgcacaggtcggtgggcaagctggagaacaacttggacggctatgtgcccaccggcgactcacagcgctggaagaagtccatcaaggcctgtctctgccgctgccaggagaccatcgccaacctggagcgctgggtcaagcgtgagatgcacgtgtggagggaggtcttctaccgtctggagaggtgggccgaccgcctggagtccatgggcggcaagtacccagtgggcagcgagccggcccgccacactgtctctgtaggtgtggggggtccagagccctactgccaggaagctgatggctacgactacactgttagcccctatgccatcaccccgccacctgccgcaggagagctgcctgagcaggagtcagttggggctcagcaataccagtcttgggtgccaggtgaggatgggcaaccaagcccaggtgtggatacccagatcttcgaggacccacgggagttcctgagccacctggaagagtacctgcggcaggtgggtggctctgaagaatattggctgtcccagatccagaaccacatgaatggaccagccaagaagtggtgggagttcaagcagggctcggtgaagaactgggtggagttcaagaaggagtttctgcagtacagtgagggtacgctctcccgcgaagccattcagcgggagctggacctgccacagaagcagggtgagccacttgaccagttcctctggcgcaagcgggacctgtaccagacactgtatgtggacgctgaggaggaggagatcattcagtatgtggtgggcaccctgcagcccaagttcaagcgctttctgcgccacccactccccaagaccctggagcagctcatccagaggggcatggaagttcaggacggcctggagcaggcagctgagccttctgtcacccctctgcccacagaggatgagactgaggcactcacacctgctcttaccagcgagtcagtagccagtgacaggacccagcctgaatagagcggccagcccagggtccccagcctgcctgccacacccagtctgtggcttttgtcaactaggacttgattgagctggggctgactcccaaagggatgccctgtccagccagacaccttctcacccactggcctgtctcacaactgccacacgaccatgattcatggacatcaagaagcccctctcccatagggctcccaactgccacctacccctcacctgtctgccctagtcctggccctgtctccagtggcctcaccctctacactctcagaccatcacagaacacctttggcttcctcattctgcgtccgtgtccagggccctttgggtagtcaagaaatcaagtgtctgaaaggcaacgaaaagtaggcaccaaacccaaggggcatcccagggcagatgctaaagcagaatcagagatggccgaaggaacctctacttccggggatgcagcccgctcctacagacacagcagatccagctggtaccctacctgcctcccagagcaactggccagtcttgggcagcatagctcccctctcagggtgagctgaagcagcagacctgacacgctggcgcctcctggcctcccaggtgagccctgctccatgtatcttagagttgggggagggcggcagagccaagtccactttctaggaaccctccaaggcttccctggcagattagctgcaagggtggagtgaagtggcaccgggggggggtgccactgtggtgggctctggtacttcatggtgaccaaggaggggactgaggtgggggcggtaccgggggaatttgctatgccagctcacggggaccctgtgatttctcaccccagcagtgattcataccagtgaagaaaagcagacttcggctccatgactcagccatgccaggcgaagggtcccagaggggctgagtcctcgcccccagctgaggcagcagctggagtgttcagagccaggagaatgacaccaggtaagagagtcttgcctcctgtcctgagcaggccccagatcccagctactctctagatttctgggctatctgagacgtcctgacaggccccaggggcgccagctgggagcagggtaacctggtgtccctcctagatctagcggtgagcagttctctcaccatcttgctgctgctttctgtctccttcaggtctcaagctgctgagaagtctttccggccatgtctggaaggggtaccaccccagcaccagcaccgtcccctcctctcttgaagctgcctgcacagaggtcccaagacactttcaaggcagagaaaataggattacaaagaggaggtgcctggcagagggcagcacccagctcagcctcagagctgaaggtgaagacaagccagcgtgaaaccccgggtctgccatgaatgcccgccccgctggccactcaccggctgcctgccacaagccactgcagcttgagcagggtctgtgccctctcagcacagagcccagttcgctgcgtggcctttggcccccgccagaaccttgcaggagccttaaggttcgggccctagtccagcctgaccttacctgctgtgccctgcctgccggtcaagcccagtcccaggagaccccatgccttggctcctaggctgttccagggacttccctgacctgcccggtgattgcccagctggaacctcatccacaccccagcaccaaccacctcgtgttggtaactgctcgtgtctgcagtctgagtaggccatgttgaggttcctccatctgcctggtccattggtgttctgagaccagctccactgctgttctgacagatcccccaccctgtgtctctgccagcccctccctgtgcccctgccagcccccacaggtttatttttgcacataaaccatgacccatactaatttggctagctctggggactagggagaccctggagatctcaagagtgtggctatcccctattttcaccaagccttcaatatccagccaggccatctgcccacaccatcttacctcaaagacagacatatatatatatacatatatatacatatatatgattttgttaataaaactatgaaattta

SEQ ID NO: 97 - DNA, 1697 bp, Lontra canadensis
tgcaccgcaccgccggcccagcaggacaccgcagtccgcacctcgcgccagtccgaccgccgcggccgcctgcgcaccgatggagctggaccacaggacgagcggcggcctccacgcctacccggggccgcggggcgggccggcggccaagcccaacgtgatcctgcagatcggtaagtgccgggccgagatgctggagcacgtgcggaggacccaccggcacctgctgaccgaggtgtccaagcaggtggagcgggagctgaaggggctgcaccggtcggtggggaagctggagagcaacctggacggctacgtgcccaccggcgactcgcagcgctggaggaagtccatcaaggcctgcctgtgtcgctgccaggagaccatcgccaacctggagcgctgggtcaagcgggagatgcacgtgtggcgggaggtcttctaccggctggagaagtgggccgaccgcctggagtccatgggcggcaagtacccggtggggaatgagccgggtcgccacacagtctcggtgggcgtagggggtccagagggctactgccaggaggcggacggctacgactacccggtcagcccctacgccatcacccctccgccagctgctggggagctgccgggacaggaccctggggaggcccagcagtacccgccctgggggagcagtgaggacgggcagccgagccccggcgtggacacgcagatcttcgaggacccgagggagttcctcagccacctggaggagtacctgcgccaggtgggcggctcggaggagtactggctgtcgcagatccagaaccacatgaacgggccggccaagaagtggtgggagttcaagcagggctcggtgaagaactgggtggagttcaagaaagagttcctgcagtacagcgagggcacgctgtcccgggaggccatccagcgggagctggacctgccgcagaagcagggggagccgctggaccagttcctgtggcgcaagcgggacctgtaccagacgctgtacgtggacgcagaggaggaggagatcatccagtacgtggtgggcaccctgcagcccaagctcaaacgcttcctgcgccacccgctgcccaagaccctggagcagctgatccagcgaggccgggaagtgcaggacgacctggagcagggggccgagcccgccggcacccctgtccccaccgaggacgagcccgacgccctcacaccggccctcaccagcgagtccgtggccagtgaccggacccagcccgagtagaggccagctcaggccccagcctgcccaccgcaccccacctgtggccttcgccagccaggactgttgagctgggctgacccctgcacgggggagcccctcttcctcacccggctgggcacccgacatcagcctgccagcctgactcccacagacacatgtcgtccagctgtgggcagcatcccccaagcagcaaagggcccccgccccgtcacctgccttctgtctatctttcctggcctccgatgcccccaccccactccctgcacactctctggccaccacaggatctcccagcctcgttcttctgctcacccccaccgcccggaccccctgggcactcagaaatcaagtgtgcagatggcctaggccagtgagcgccaagcccaaggggcagccccgagcagaagctgaaacagcaccagcgccg

SEQ ID NO: 98 - DNA, 6463 bp, Chelonoidis abingdonii
acgagctctttgttgctttcacccggcacttggcactagaagttaacagcagattggaaattgctaggatcttagcaagctgcttctagctgtgtgtgtgtttgagcagagggaactctcgaccgatcaagatcccgtactccggacgaggcgtggaagacactggacgtggtgggagatcccaggccgggatgccctttctttcctagacgctcactgccgtgacggtgtcacccgaggcacgtgggaccagcgcgctgtgagcagcctgaacgaatttgccaccgactcctgctggctgcaaaggggactggacagctctccttggggtgatatctgactcggttgtgtttgtgtgaggcgtacttggggaggcaagagggggcagtgtgtgccttttggtagaggatttaaaagcagggcaggagtgtccctaaattaaaagccccggggtaaccactagggctttacctctagctctgttgcgttgctgcttggtttagcctgctcacgccacaggtaccatgcaactggatagcgtcaccaatgggagcgtccacaccttccaggggcaccgtggagtagtcaataagcccaatgtgatcctgcagatagggaagtgcagggctgagatgctggagcatgtcaggaggacccaccggcacctcctcacggaggtgtccaagcaggtggagcgggagctgaaaggcttgcagaaatcagtggggaagctagagaataacctggaggaccatgtcccatccacggacaaccagaggtggaaaaagtccatcaaggcctgcctggccagatgccaggagaccattgctcacctggagaggtgggttaaaagagagatgaatgtctggagggaggtgttcttccgcctggagaaatgggcagaccggttggagtctatggggggcaaatatggccccacagaccatgccagacaaactgtctctgttggggtgggtggcccggagagcaggggcaatgacggggagatttacgattacgcccttgacatgagccagatgtacgcattgactccctctcccggggagataactagcatgccccagccccacgactcctaccagtggatcactgccccggaggatgctccgccctcccccgtggagacccagatctttgaggaccctcgggagttcttgagccacttggaggaatatttgaagcaggtgggagggactgaggagtactggctctctcagatccaaaaccacatgaacggcccagctaaaaagtggtgggaatacaagcaggactcagtcaagaactgggtggagttcaagaaggagttcctgcagtacagcgagggcactttgaccagagatgccatcaaaagggagctggatctaccccagaagcagggggaacccctggacgagttcctctggcgaaagagagacctgtatcagacactctacactgatgcagaggaggaggagattatccagtatgtggtaggcaccctccggcccaaattcaagcgcttcctgagtcaccccttgcccaagaccttagagcagttgattcagcgggggaaggaagtcctaagtgacttcgaccagtcagaagagccgaccccgcaaagaaccccagagcatcagccaggggactcagttgatagcttgccaccgtcaaacacagctagtcccattgccagcgatgagacgcaacccgagccccctaccccaccagctacagtgatatgaggtagtataagtatgggattggcctgtattatacaaaggtgtggagggggctgatttaggaagcttctccttagcaagaggttctggctgtgacctgtcatggctgaactcagtccagtggtcctcagcagaggaatgaactttatttacagatgggccatgtgagaacgtagctgcccgcctcacccaagtcatgtgacagggtgggggcaagtctgaggatactattttaaccactgtggggtggacagttttatgatattcccagtaggaagctagacagttcccccctgcagaggcagccaccctatgctggcacctttcaaggacttcaaacaggtgcagctaatgaccaagagttcccacctacccacctgtctcgtatcctctggagaggggtccccttcctcagtggaacatctttgttttgactcttgcccatctctgccttactgacggggctttgtccacccaagaggaagccactggcttctgcttcccttgcactctcccaccatagcttcagggaggaaactttttaaaagttcataatggttttgaagtgagcctagagatgcagcaaatggcaactttaatgggtttgatcaattttaccacctgctgttgtatctcatctggcacctgctctcatttttcatcccagtggttctctcccattctcggctctttctctccccatgggtgacccatgccaactggctgttgcagcaacaagggaaatttcatcccatgtctgctgctatcacggggagggaagcccaaactcactcccccaccatccttccaggtggcaattcagcacgtgctgtttcaccactagactgggcacaactaaacctttgtttcttgctgaatctctatctcagattcaggaccaggcagattaatggggataaaccagagatctttctactttgggggatgtgaaatggggcaatcagacaaggcaccaacattgtacaggggtaaattcctatttttttttatatcaaacaaacacaccctgaactcagagcaaatttcccccaagcagcaaagcaaggcccctccattggagatgccaggacagtaggacatcagaagtccgtttctgtgggactttgccacaggaaagcagaaacaaagttaagaggcttctgtgcttgcaaagaagactcctttatggcagatctacacacacgttgcttttggaaggtctgatgtcctaggtatgaggagtccgatggctcagttgtgtctaaaactgctggactttctaaaccagccccttcgttctgcaagctggtactagatggtactggaattgggctctgtgctacttttccacgttaaatatcaaagaccagaactggctgcactttgactaaagcatgaagatgtgactctgagacaggacatttggaccttcttgctcgtcaggcctgggtaacatactgaggaaggctttactgggcgtgtgccagcaacagtgccctaccccactgacagctgcacttcagcaactgcatagtatccatgacctgatttaataggcagcatcagcatgtgagaggaaaagagaaactacaaggagtagctggaatttccctgggactccgcagctgcccaggtggctctgaaagcctttgggtgtgacaccttcccagaggctgaaggtaagacagtttctctactctgcaattagcaagtgttaaagcaagtgtcataggagctaactcagccccggggggggccacaatactgaagccaggggcgttgcaccaagactgaccttggtccctaaacttaggtgcgccgctgaagcatgtaacgccagacagagggatggagattgctttgcatggcccctgggggtataatagcttggagtaaagggagcggatcgagcaaagggaaattaaatgcattgaactgtgggataatgccctgaggggagggatgggatatttaaaacagggataattatccctcctgctagctaaccagcctaccagctccctctttgacacagctgaataagccactgcctctagactaagagtttctaaattcaagtcctggggatagtaacctgcacagcatgagttgagtctcagctctggggactttacccatgtctgggacagaaggcaagcgttctctccttgctgctgagacacctttgcttggctttgactacatgccagtgcagacgggggatctttacactagcgagctgggacgcgtgggaatggatgacagagtgtcagtgcaaaggagtatctgtcactgtggctcatgggtattctctgctttgttacagtgactcactcagcccctcctctgaagaattcactccacactgcttctagcacagaagaaaagaggcttgaattccaagggggagcagatgtcagaattcaaagccaccgtgtgcctcatctggagtcctgagggaaacacccagaccaggtaattagtgtggagcctcctaaagggtctaatgccaagtgtcccctgaagggtgcttggtgccagtgcatgcaccacccagaggagtttattcctgatagggggagtgggcatcacagccttttcttctgcttatgacattcaggccaccaagcagccatcagggtctgacccaggccaccaaggggatgtctacacagaaaagaaaaacccacggctggcccgagtcagtcaaccgggactgtggggctgtgtagacatccagactggggttggagtccgagctctgggaccctcccagcctgcagggtcctagattccaggctccaccctggtggtctagccctggcggtctagtccctgctccatcccgcgccctccacttaatcctgcttgttgttgcttttagggattgctgctactgttgctgagactctttccgtgtggctgagagccgctgcttccactgggaagaatggggagctcagtgctcccagaagagccttctgccagagaaagaggtggtgggatgaaagagcaattttaaagacacagcgataaagagacgaagagggaactacatccgctgagcagaaaaaactccagggattgcactggccaaagctgggccaagctgaatagagcaagctctgtatggaaggaaagacaaaagagggcatgaaggaacaaggtggtccttggactttggggacagcagaggcgctggagttgtgctgtaactgagcaatactccctgctgatttaggcgtaactgcacctggggatttggaggctgatgggggctggaggaaagaattgatccttggatgcaaactaaaatcctgctctgattcaatttgctgaaagtgacagatccaagcgggctgagaactctcctggttgttaacattttaactcatttgacctgactgcgggtagtttcatttcatgcaggtagccgtggtcaaactgcaatagctttgggggttcagaaaagcatcctggaagccagatgcttgtctgaacaatgtgagtctgcacaactgggccagtcagctcacaagaacagaccctcttgtgagataataggcatttcctgcttctggatgggccagaattactgcaagaactgggcttcttgtgctactttggtgcttttctttccagccagaaccaggaagtggaatggtgtgtgaaaaacaatcatgtgagtgaaaattgacccaacttttttgaacttcaagaaagttttgcttcatgtgttgggtgaagggtcaggttggttcttatttcttccaaatccacctgtcccatgtgtgtgtgtgtgtgcgcatgtgctgagcaaccaaatcaatcccaataaccaaattctacagcattttgttacattttgactgaacaaatgatatctgatgcatactccaacgatcagtcagcaaaaatccccagggaccagattgtgtggatgccacaggaagctggcagctaggtagaccaccggggtaaaaatcctttgttttgcagtgctcagtacgaaggctttttcagggacccccaatatccactggcattgtcttttggcattttcttttcctgaacatttattctcactttgctaaataaatgaagcgaaccgagccatggcaccttttggccctgggatttttgtcacctgacctttagaagtatgcagaactggatctctggtactggttttattccactggttgctcctagcagattggagctttacttgtagcaccccgatttatataatcagctcttcttgaaagaactgatagtacttctgtcccggggcagactggcatgtgtgagttagtgtgcgttgtgtctgtggaacctaaacagaactctactcctgtataattttcttaggcaattttacattttaactctgacaaagctgctacataggtttatttttactatagatcttattaattcagacggtattgtataaaaggtgactctgtggagccattacgggcctctttattcactgtattaagttggaagccaaaggtctttgcacggtgaaataacttgacctaattctgactgtatctgctcgtttatccctcatgtgtcaccttggagttactgactcacccaaacggtgtcagtcgctagaatctgtcaatagaacaacaccccattctgtttgccattgtagtaaagtctattcttagaaaagagccttttgtagatttatttaataaaatgctgaa

SEQ ID NO: 99 - DNA, 21478 bp, Hylobates moloch
gcctcactggctgtgagtgtgggcggggcctccttcatcacactcggagaagagggaccctgggcttcaccagatgaacctggcaaggggtgggggtgggcagaccaccacagagtggtggtccccactgtactgcatccctgcagtgccccccgacaagcctctgaggggaggccccatcttccccattttccatgaggagcgtgagtgagcaaggggcggatgtgacctttaccccagagcgaggtggctgcgtctccctgccctccctgcactcccctttcactcgtggttctcaggggcatttgtcctggggccaccaggagagaggggtctggccctcagactgtccagaaacgcctggcggggtgggcctctgccacctgccccttgcccacacagggcagggctgtcgcctgcacccctgacagctccagcgcccccgcggccctgggcgagccctgtccaaggttctgaaggagaggcgctgacccctcggctgttttgctgctcactgatgccccagcaagggccagggagggtcaggaacgacttgggtctgagagtgcccctgggcccccctggggagctggtgtgtgtgtgtgtgtgtgtgtgtgtgtgtgtgtgtttgtcccagtcgacaaccagtgaggaactgaggcctctgccagacgctgtgtgaataagcttagaagcagacgcctcctcagtggaaccttcagatgacccagcccagctggcacctccagtgtagctcagagccaccctgagctgagccccttctgagttcctgatcacagagaccaagtgagggtgcaaacagttcctgctgtctggcactccttggttctgggaaatttgttgcaccgactggcatgggattgggtaggccgccctccacctccaggggcattcgctcagtagtttcatgccccagagcccccagtgagaccaattgaagctggcttctggctaagaacaaacctttgcccagctcttccccctcccagtcctgcttctcctgagagacttccttagtaaagctcttgaacaaaaggcctcattgtatgctctccttccagggagtctgacctgagacagtggctgttcttggcagggttgaccatcgctctgcaggatcctgggtgatgagagtggtctccctctggggtcttcctctgaaatggtgctgagagatggttcctcgtgggtctctcatgtttctgcacatggccaagtttgttctgctcagggctggacccagcactcccttcgcgggaatggaagtggggtgggggtggggggtgagtagcatcaagccatcgagccaggtcctgagcagaataaacgtggtcaacgtggttgaagacccaggccctccacccttgttctgccagagcaagaggtgggctttccttgggaggaggctgagagagcgagcgtggggacaggtggagaaggggacttgcctcccaactttgatcgcagctggaatcaagggacctgggtccctgctctcaccaggctgggagcaccgacgccagcagagggtgggagtcctgggtgctagaggcactggaagggggctactgttgatggggctccttcggggcacccacctagaccccagtcttcttctctgtgaggtgactggcaggtccctgcccagctccccccaccctggtgttccagttctcagggtgtttgcccctccctgaggctgagccatccctggacccctgcagctctcagcacttcctatctctggcaaaggccacctgcaaacaaaccaggaactcctcaacagcagggtgtgatgaatcacctatggacttccccaatgccccctgtcaccaaaggaagtctccaataaagcattgttgagcaaaaaaagataaatcaatatgagggctccttgctaagcaaactaggagtgagcaaggaatccaactcactagctgagggactggcagaggagcttgactccctgggacctcacaccttagagtcatcccatctctgatcccggggatgtattccttttggagcctcttgacccttgcctggacagagaagaaaggaacagagtcttccaggcttgcacagctgcccactggcccatcacctccccatccactcctcaggagtcactcaggttttttcctgagaccccagcagcaccagtgatctctccttctgggctccagagtctctggtgcacacttctagagcccctggagggctgtaccctaaagatctgctcatgtcagattctaggaggactgcagtttgggcttatccattcttgggccttaggagggtggataggtgggtgggccagagctgggtgggggatgaatttctagatgggagagtggaaggttaggggtagataagatgggtagatgggagaatgattacactgatcatggcattaacagttacacagatgatgagtatggccacagtgggaagttgggcatggagtgtattggtgttgaaagtgatgggggttgtagtttcattgtaattgggtgatgataaagatacaagtgatggcaatgaggattatgttaatgaagatgatgatgggaaagatgaccatgctagcgctgacgatcataatgatgatgatcgtgtcgaggtggaggtgatattaatggtagcaatgatggtgacagtggtgttgtaatgaaggtcatgagaatgacagtggtaaaaatggtgataatcatgatagtgttgttgaactcatgaggatgatggtgatgatggttgtgatggtgatgctgctgctgctactaataatggtgttgatatcactatcaattatagtgatagtaatgatggtgatgatgacagtgatagtgatgatgatggtgatgatggcaatgatgatgatagtggtggtggtgttgatggtgatggtgatgatagtaatggtgatggttatgatggtgaagaagatgatattatccgtcatagtgttaatgatgatggtggtgatgatgatgatgatgatgatggttgtggtggtgaagacaatgattatattattttccatcatagtgttgatgatgatggtgttgacgatgatggtgatgatggtgatggtggtgatgatgatggtgatagtgatgatgatgaagataatgatggtgatggtgatgataatgatgatgatgatggtggtgatgatgatgatggtggtgataatgatgatgatggtggtggtggtgatgatgatggcgatagtgatgatggtgaagataatgatggtcatggtgatgacgatgatggtgatggtggtgatagtgatatcactatcaataataatgatagtaatgattatgataatggtgatgctgatgctcatacgatggtaatagttatgatggtgaagacaatgatgatatcattatctgggatagtgatgatgatggtgagagtaatgacagtaataaccatcacggtgatgtcaaaggtgataagttgggggtggtaatgagggcatttgtgtcagtgttggaattggtggtggtggtgacatttggttttggtggaggcaatgagggtgttggccaggtgggtgtcatgggtggtaatgatggtagtgacgattgactgtcaggctctgaggccacaagtggactgacagctcttcctaaaactggcttagctgactgtccacagatttagaccatgccttcttcagcccctatccctgttgtgggctggctggggacattccctttaggttctgaaaggctgccttccatggaggctgtggaatgggctcaggcccctccctatcagcccagaaagagagaccagggctgagggctggtatgacccattgccaaggcagttttcatctctttggcctcttgtaggcatttgtgggagagagagtgttgttttctccagagccaggatggagtggagatgacaaccccattcctggctgttccacttgtcctcagattgtagcctgggcaggtgacatggctcaatgttcccagtgtccactgaagaaatctgaggccagagagggaaagtgaccaggttgagctcaaagctgagtccctgctcctgagacctccctttcccagggacctctctgtctggggcaagcccaccttgtgtggcaggctcttccctaattgaggagtcacactcctggattctgtgcccacttctgccccctcttctctgggggcccctccctgcctcggcaggctcacctgtaagggggagggggcccgatacctgtacagtgcttctgcacgatgccttttcttggcgggtccagccaaacctgaagaaaggagggtgggagagaaggagagagagtgagaaggagtcagaaaaaagtataatgagtcattggttcagctggtaggtggcttgggcttccaagcagttagtcgcagagaacgagattctgtgccagtctccagcaggacggcatctgcccctcccattggtgaataaagccatgcagtaatgtcactcggcactgtccataagcatgccactctgctgactaattctttttaattagaaacaagaagggcaaaaaagcgttgtccttgggaagcttgacaagcgtgggtttcagaggctgagctgctgctgcccaccactgctcctggactcttgggttccctcaccattctggacttagccagggctaagtctcagattcaggctgggtagttctgggtccccctaacttggcaagaggctcagcaaagcagcctgggagtggggcagctgctgttctcacccctggtgaggtagatgggtatgacatctgcacctgccccccagcacgctcactgagtatccgcggtgggggctgggccaggtgctggtcattcaggcatgagcagggcatggtctatgctctcaaggtgcccccaggctggtggcacaatgagcattcaggggtgccccaggtctgtgggagcccagggcaggaaatgtgtctgagtcagagggcatcctccatgcaggaatttggagctggcccttggtggacacaggaggagcctcaggaacaggcatggtctgcagcacccttgaagtgttcctcatcgccctcataacctcctgccagtctgcctgtgccatatgcctgtcttgagctgggagaggcttgagggctgtggagttttctcaataggagacccagcgcagggccagtgcaaacccgtacccaatgataatcattgtaataagagccgaacagtgacgtggagcaagcactttgtgtgccaggctctgcccgacctaatccttgctgtccgcctgccaggtgggcgctgtcaccactgcgatgattactgcagcacaggcaggttcttgattgttgctcagcaacttcacaccgagaggattgagagtcagatgtcagaacacaaaatgggtatttcagcaaacgcttcgaaattcatcagacccctcagcactggtagccccagaaagaaaaccttctctctttagtgacagcttgtttgaagaaacaggctagaagcaagtctcctcgaaggccaagcttgaaaagccttcaatatggcggggtcttccacacccagctctgggtgcaggagctgctcgtcagctggggtttcatctgatctttgaaatgaagtggaatcttccagaggcttggtgacagaacatcatcattctgatcgctggctcagctaagccatcccatgagtcatgcactcctgggagaccctccacatggctgggagatggggctacagggactcacagcctaatccactgcctctggaaagctaggtgccaatatgtgattttcagagattccctgttacaggaaacaaggtctgaattgggatatcctgtcctttctgtgccttaggaaagtggattgaaaaacttgctcacagccacatagccagtaatgactatgaccagaacctgaacccaataccttcccctcaaagccttaccctcatcagtaaaatccattgtcagccagaaagcaacctggagttggggtgctcatataatgaaggtgatggtagtgagggggaagtggcaagcactgtggtgtggtgatggtgactgagatgttgatgatgggaataacaatgagtagtggtgacagtgggaggtcatggttatgaagcgctgatagtggaaggtcacagttatgaaggtagtgacagtgggcagtcatggttatgaagtgctgatagtggaaggtcacagttatgaaggtagtgacagtgggcggtcatggttctagggtggtgacagtgggaggtcatggttatgggggtggtgacagtgggaggtcatggttatgggggtggtgacagtgggaggtcatgtttatggtgtggtgacagtgggaggtcatggttatggaggtgctgacagtggaaggtcacggctatgggatggtgacagtgggaggtcatggctatgggatggtgacagtgggagatcacggttacgggttgatggtggtggacacagtggtgatggaaatctttggtggtgctggctatgacagttgcattgatgaatagttgaagtggtggttttgctggtggtggtaggactgcctggggtagtggtggagaaaatgagattggtagaggtggagatgatgataggaagtttaccagtaagatggtgggcgtggtgggggtgtaacagagttcctgggtggcagtgttggtgaagaatgaaggtagggtgctgctcatggtttggtgtagtgtggagagtgtggttatgatggctgtggtggaaggggctgtggtggggtggtggtgatgggaggccacgatgatgatggtagatgggtggtgatggtgctgatggcaattgagatgataatggtggtggtggtgatcacgatggtggtgatagtgcaaggaggccatgctgttgatggcagttgagggggtgatggtggtggtagtggtgatagttgtggtggtgggacagttggtggttttatggtggtgatggaggtgatgactgacagtggggttggaggaagtggttgtgacaataattatggcaactcataagcgggaacattcagcattcaggtcagagcctgagctcctcgtgggagagcagtagaccttggtgagcacgcctctgggtgagaatggcatctagagtctggcccacccctcccatggccagtagcagggctcctgggagattcatggctcctggagcagctcctgcttatgaaaattgggcaacagtgcactcgccagtggctagcgcacgccttagccttccgcctctggcaagggtgggctcctagggctcctgaggctggactgggggccctggggtctccgtgtccccatcctgtgttttgggggacaggcaatgcctgggcactgagaagccgcttgactgcccccggttgcccatctcacctccttctctctgtcagtttctggatctctgtcccgcatagggaaaacctgacttcccagggccgagctcagtgtctgggggaacctgacctccaccctgagggtccccagatctcccagacctgcgcagaccctggaacggggcatctcagatctgagggagaccgtgggtaccaggcaggccctggggagagactgagggctctaagaaggaggagctctgtgggatgaggggcagggctgtcagggcaggggaggcctgggttgaagccaagccactcaggtgcttgttctcagttccctcaggcagggagggcaggaggagggctgaggctttagtcctggaggttttggaaaggaaaggggcacattcaggtggggttcagtctccaggagtgggtctggggcctgcagaggctgctgaggggtgtggagaggcccacatttctggagctcagtggggcatgcttgggggtggggtgcggatccaagggtgaagctggaggggtatgcacccctcccgccctgtgccttctccctgaccgccagctctggggacagggtgtctgtagcagtgagacaactgcccccatattggccctcacctgctctccctctcctcttgggatccacagtctgtggacccagcctccgtctggacgccctgaaagggcctggcctcccctctccactcctcctctttctggggtgaggagcacagccactgtccttagggagggccgagggctggaaccagagagggacagaaagggttagagaccgacaaagggggacagagcgggacagagaggcaggacaaagatgaggcaggggcaggaagagacggtgggggagaggtagagagatggagagacagggaccactgaaagagggagacagggaaggctggagaccacgcgaggcggggtgcggccagcaggtggcgtgcaggcctcaaaggcgtccgctcagccccggacccaggacggagggagggctggcaggaccgggcccaggagaatagcccaagctgccagaggccggggaggctgaggatggcctgggggtctcagagcccttcctgcagacacctgcacgtgggtccaggcttgccagctgtgagcagagcagcccctgcccggctcggtgccctgacccagcctgaactcgcagcccaccttcctctgccgcccctgaggcaccctgctcttctcttgggcgggccccagcctcaggtgctgcccctccactgggaatctgatccccggtctgacttggcccaggaaggaacaaatgcatttttagaggactctgcgacattcgagtttcatagcccctggagtggggagcagagggcaggcttggggcacccccgcctctgtgatctcagcaattcctgacccttcggggcctcagagctcacgggcctgggagagggaaaaagggagaggagaaggtccctcctggtcccctttccagggacagtgagagaagcccagtggccagggagggtgctgaccccaccctgaccttccctgacccacccaccacccaggctgatcagaggctcagcgccagcatgcagtaccaaggcagtgtcagagagatggatgtgcttctgccagccgcctctccaccccgggctcccccggcctgcccagggctctgcagccttctcagcctgccatgccctcccaggccccaggtctgccaccggatgcaccttaggaccaagatgcaatggagggacatgggctcacatggccctggtcctgcccacgcagactgcccaggcttctcaccagttgagcctccccaactgcctgccccacggtcagctcagagggtttcctgaggacgtcggcctggctcttgggagcagcagatggcagcaggctgaggactggcggcctcagggccaggagagcctgagtacaaatcgcagctcggtcattcactatggcccgggttccccggcacaccccttgccatctctgtgcctcagtttcctcatctgtaaagtggggtgacaccgatcgccctcccggctgttctgagactcagtaagatgcccggcgcacagcagggccctccttttctcaccacaggacctctgctgccacctgcttttccagaaacacacagcacagtgggctccccacccccaccctaggaccaggaaggagaccgtggtaggagggaccagtggcataatggctggggtccagcacaaaatgaaaacagaggccctttgtccaaaaatgaatcaaaatcgtacagtgctaaacccagcaccgcccctctgagctcagggaccagcgtgaccacccaagccgccagccctcctgtgtcccatcacactccccactgctgggcctcatgagcaagctggggctgcccagggcagatgcgggcacccatggtgtctggggatgtggtgctgcgacctggcgaggtggaggctctgccctctgggtctcagcatctccctcatctcccagggcaggcaagaccttggagagaagctgacccaactcccagcacctgctggcgctcagtgggcaacgactgtccccatctgtgagccccaagccatgtccagggcagagccgactccctctgcctcaggaagggtccctgggaatttgtgggagcctgaagggccactaggcagggccgggacctcttcggagaggggtgtgtcccgccgccctctgctgcctgcccctcctgcggtgctgtgccctcgtggggcccagtgcctggaagcaggggatggtgatgccaaatcctgcgagcacagcagcctgcggtgtcatacgggagccaaggcagggccgcgtgacccctggctcctgacctcccagccgggggcccaggtcgtccactcctggtagggctggggctgggcaggggtcccttcaggccagcacctcagagagcgggcgggcgggcgggtggtgcagagcctgcatgcgtgaggagctcctggccgcgtcacagccgcgctattctcagcctctctccttttatggctccggaagtgagctggggttgctagcagcctggctggcattgaggagagatttaaatggagatgcagagaacagcaggaaagcgcagccatcagggtgggggcagcgtaccgtcctggacgccaccccctccctggcacgggcatcctgaacccccagctctgggggcgtctggcctggccagctggcagtgaatccttggtcctgattttggggcagccaccctcggggctcctgcagcacaatctgggccaggtgggcgtccagggaggtgtggggtgggcacacagtctggctggggacccagtgtgggggagcgccaggctccaacccccccaggccggactccagtggctcctcacaagtccccctcatgctcctccccagctctgtgctggcaacccgacagtggggaccccagctctgtgctggcaacccgacagtggggacccccagctccccctcagccctggccccctaaacagctcttaaacccagcaaagccactccccacctgcctgcccctctctgcccccactgtcctcccttttccatcctcccaccagctccaggctggcatcctggccaaggtgaggcaggccccggacctatccctcccctatctcccctgcctccaggctctgccctctttggaaagaacccagatgccccccctgctcctccttggccccccacaccaccctcttcacaaaggcccttcctcacctgcccactgctggcctcacacaccttggaggtcacagcatctccaatggagccagaaccaggttccatgtgcccagagcaagctcagggcacacaccaataggtgtgcaagagacgggtaccctggcccacccactcactcacactcacacacactcatatacacacacagtcacacacactcatacactcacacacatgcacacacacacagacatgcaggaagactccatttgtgctcaggggctcctatggtagcacacacaggggaggccaaggcacgcagaagactcagtcaacatggaacgaggaggtcaggaaggcttcctggaggcagcgatgttgggctcaggttcagacaacacttacggcaaagccgactctttatgcttaggtgttaacactggaacgtttgtcagttgaacagggggtggtgggcagtggagtggacggggcgttctgggtggagggaggctggtgatccagggcccatgggctcctcctcactctctgccacactgcccaagctgggaaggacctcagcctccatttggtccactctgtcccctgtagatgaggacatggggccagagaggttgagtggctggcatgaagtcacacagtgcctcgtggagatgcacgatgagcggtgcctgcttcttcatcccgtgctcggaccaggcgggaggcacccgctgtgaggcgcctcctgggctcagccccgcctgctgttcccaccagcacacctgtctccccatgtgcacccaggatctgctcctgcagtgcccagatggccctcctcccctgtcccagcgtgggcagtgccagtcagaggggaccagcctgaccccccagcgagagctcccggaaggagagagcagtgggtgttctttgcagagctctgggtggggcgacttgctggtgctgatgggtggcaaagcctgcagggggcacggtaatgcccacccccttattttatggggtgttctgcacctccttgcactccaccccctcccagggtcatgcctccatctggcttagtacctgccaagcctgtctcggaaacttttgttgacggaatgactgatcaccccaccaactgggcagggcagagccggagctacctcggagcacttcctcagtgaggaaactgaggccagagagggcgtgggggcttagggaactcgcctacagtcagacaggaaatgaaagtgtctgtgggacacctctgggaggttggaggtctccccaagaccccagagaccccagactcacttcctgccctggctctggccgtccttgctgtgtggctcgggctaatccctggccctctctggacctcgatttccccttccgtgcacggctggggtggcggtggtgaggagcgcatgtcccttgtctgcctgcggtcggcggaggcctgggctctcgtgaccccacctgccccgaggggacgcctgtgcatctgggccaggctggctggaaaaatacagaactttccttggaggctggactgggaggcgctgaggcaggaggcaggaaggaggaaggaggagggaggagggtctggtgtgtgggggcccggaacgaacaggctgcctgttccagggacagggacgcagcagcacagagcctgccaacagaagaagacggaaggagcagttgtggggcgggggggatggtggggggtggggggtagaaagaaaatgttcccgcagccccagggggctggggaggctgcagaagctgcagagggaggaggcctcggaggcccctgggcccacccgccctgcacccatctcccattggcccccaggccatcagcttccatcttctgcaccagtgccagagccagcccactccttgcggcccctctcatccctcagggtctctcccagcccttgttgccaccttgggaacaccaagcactgtgcccatcactgatgggggtctcctaagacctctgcccccttccaccctggtcccctccagggctctcacagaggctgtcgggctgcagcagctatgagcaggtgggttgatggacgagggcctcagctctgtcacttgcccactcagcagcctggggcaggtcctcccacccctaaggacccctgtggaagctgaggcgagagcatctacctgggtggccaagcaggagcagctgcgccccggcctctcctctgcccctctactttcccacctcagtcctttgtgcctccttggtcttctccccaggctcagccctggcctgctgtgcgccccacccccatgctctggaggtgaactgggaccctcattctcagctctgctctctgcctaccctggcccgtccccactgcaggtggccctcaggtcggagacagcagagcccaggtgtcctcccggctgcctggacccagatctgccagctgcccctgcaacttgccaccaggtctgtgccaccactgcaggagcgacaccgggggtgggcactggccaggccttgcaggacagaggagggggcaggacgaagaagcccccagaacctctcctgaggagctgagggcagggccccccggccacttctcaggctccagagtggcactgacgagaggctccggcaggaacagctgggagaaacctcgccagaccaggtggcacgatgccagggacgaggctcctggagccccggagctcccggccacccctcgaggccttggcattgccacccactttatggatggaaagctgaggctcaggtgagcaactgtccagtgtttcctgactagaaagggatggaacaggagccattccagccctcagaccctcgccagtgcccgctctgggccaggccctgcttatgctgaggtgttcacctatgggcaccacctgtagggtggtgcagggactcagccaggccaggcagctgggacagccttgacctgtgcctgcgaggaagaggcaacaggaaaagaggatacctggggtgggagtccggcctgtgagcccagcgaggtcagaggtcagcagctcctgcagcatgtggagtcctgggctggacagcaagggacacctggtgggagcaggtggctgagaggctggcctccaggtctggccacgcagcctgggccagcagtaggcaccctgagggcatagggcagcctggttcttctcttccagccccacagggcagtaggtggtgacagatgaagccacaaggctggggagtggtcacatgtggggggcgggtgtccgaaccaacccctgggaccgccgcattccttctctgctgccggctcctcactccacatggcccacacggaagggcagcaggagccccggaatgtgtgcaaagggtggggtgggcaggtgtgtgcggccagcagtgggcaggcgaggaagggcctctatgaagacagtggtgtggggggcctaggcagagttgggggccctctgggctgtttccaaagaggacagagcctggaggcaggggagatgggggaggtgtgtgcctctgcgtgtgcccatgtgtttgcgcatgtgtgtgagtgggggtgggtgtgagctctggcctgaaggggcctgtgtttgcctctccctgctgagcagcgctaactgccggcacccgagatcagcagggccagcctaggggagcagcaggatgccccaggtcagcagctgccctgtgaacgctcctggcaacccagaaaggccctgccggagtgggtcagccagggctgagaccgtctggggctgcagggagagagccgactcccttcgctctgatcaggcaggagcagaggcggctgcgcaccgcagaaggagaagggaggcccagggcacagggtggcccctgcctctcagagcaggtacccgcacacctctgggaacctaggtggcgggggttcaggaaccagcactaagagatccttcgaggctgctgtgagcctggtgatctcaaccgtgaacagaacctgggggtcacgggctaccccaccctcccctgcaggacccctcctctcaggcaggtgggacctcagagctgtcagacctgagcggcagcagaccgggttggctttgagagtgggggtgccccaggtgctcccgacccccttgtgcaggtctagcccccacccccttcccctgttccttcccccaactgcacccccaagccatgctgctccagtggctgtcagggactcgcagggggtgggggtgggctggagagaggggcagggcaggcccctgtcaggagaggcccccgccccaggtggatgggagccagcctggcctcctttcccgaggctgcagtgtgggggtttggtgagggcttctggggcgataattgggcagcgattaagtgttcctggcagctgcggctgttgcctgtcacctgtcagctcaggcctgcattcacagcctctgcagaccctgctggagggagttggggaggggaagatggggctccgcgtggtacccccgacgctgcctgccctcgtgccatccagggcaggcactgtgctctcccaccggtgtcggcttgaccattgctggcttgctgtttagcaggtgacaggggtggtgaggggccacggggcactgagcagaggacaccaggattcctcaccaagggcctggctgctgcccagccctgccttgctcaccaggccaccttgggcactcacccttctctgggcctggctccctccacgcaggtgagggaactgaggcagcggcaccacctgtgaccttggctcacgtgtccccagtcctgcctccttgtcagcttgccaatgcctcgggtgggggtggcagctggaggctgtgccctggcagggacgtcaggagccacatgggcttgtaaaccctggcggggctggcccctggtcattgaagtgctggctctcacaatggacacacatgcacggtcagtgcccagtacccagacaacacttataggctcacgctggtcccaacccagacatgtggccctcggtgaccgccggctgcactcacccaaggctgctggcatctgcccgtcctgcatgtgcccacccagctcctctccccgggattccgcagtggagaagcgggaaggtctctgtgctggagtcttctctgcctggctccccctcccagctcagcggtgcccctccgccctcccttctctgtccgcccacttacctttaattagaaatgccaggagagccatttttggggagttttttttgccagaaagacgttccccccaggggtggaaggaaggaggagacagactggctctgaggcggggagagggctccccgggagagccggttgggggggggggctcagagggttggcagggagtggggattccagcaagtgggcacctgtgtgcccttgagtgcctgaataagacaggaggtgctggagggagctgagggctgtgagtggggggtatgagtgtgtctgtgggagctatgagtggggggtatgagtgtgtgtgtgggggctgtgagtgagggcatgagtgtgtggggtggggttagagtgggggctatgagtgtgtgtgtgggagtgtgagtgggggtatgagtgtgcagcatgtgtgtgtctgagagagggaaagggcagctggcagcagggacaagatgtcttgattgtcagcgatgatgtcctcatggccctctggctgtggggaatggtgtgtgtcatccgtgccggggtaacatcagaggacctgagacccatgcctatccagccagcactggagtaactcaggaagggcgtccctacccctgccaggttgccagggaggcagaagggacctccctccagagggagtctcggcttccggagccccactccttatatggtgcttggcttccctctgcctctcctgatgcaccgtgctgccagcaccggcccccctccctctccgtcctctcctctcctccctccccctctcctttccctccttcctcctccctccctctctcctcccctcttccatcttcttagacgtcttggagcctctggccaggttcttgatatagccagggtcttcagggcccagttcccttcattgggagctaaatgtcccctccgtgtcctccaaaccccagccccccaggtagcagctgccagatttccctgcaaatacaggaaagtattgggccttaccagagacctgggtgtgggggcatggggcagccctgtccagtcacagcgagagcctctgcctggctgtgcgtccctcacacagagcccaagacccggactcaggacctaggcaggtgtgagtgggagctcaaagccacatctgagagctcacatgtagacttgctgagcccctgggcacagaggctgatggtgagggtccttcccgggctgagctgcacatcctgcagagctgggcgggcagggtcaagggcagtgagaacccaggagagcagtggccagcgccagccccctccaggcccccaaagagagatgcgagtggagaggagaaagcccaccttaaaggaccctgggaggcagcaggtgacagcccgcccagcgcccgggagggggcgggggagaggcgcccagggcccggctcagtccctccggtccccgcaggctgaatgagccccgccgcccggggtgggaggtgcggagcggagggattagtcatcccggccccgccatgtgtgcagggggtgggacctcccgtcccttgccgcccgggagccgagtgggcgcagggcggggcctgcaggggcgcgggcggggcgctggcggggagcctgcggctgggccaatgagaaaccgggctcggcgagccggccgcccacgggccgcgctggctgcataaagagccggcggccaggactcagcgcagagctcgggcgccgcgtcctccctccgcagcagccgagccggacctgcctccccgggcgtgttccgccagccccgccgccggcccgcagcgacagacaggcgctccccgcagctccgcacggtacccaggccgccggaccccagcgccggacctccctccgtccgccccgaggagtttgccgcctgcccgagcacctgcgcacagatggagctggaccagcggacgagcggcgggctccacgcctaccccgggccgcggggcggtcaggtggccaagcccaacgtggtcctgcagatcgggaagtgccgggccgagatgctggagcacgtgcggcggacgcaccggcacctgctggcggaggtgtccaagcaggtggagcgcgagctgaaggggctgcaccggtcggtggggaagctggagagcaacctggacggctacgtgcccacgagcgactcgcagcgctggaagaagtccatcaaggcctgcctgtgccgctgccaggagaccatcgccaacctggagcgctgggtcaagcgtgagatgcacgtgtggcgcgaggtgttctaccgcctggagcgctgggccgaccgcctggagtccacgggcggcaagtacccggtgggcagcgagtcggcccgccacaccgtttccgtgggcgtggggggtcccgagagctactgccacgaggcagacggctacgactacaccgtcagcccctacgccatcaccccgcccccagctgctggcgagctgccggggcaggagcccgccgaggcccagcagtaccagccgtgggtccccggcgaggacgggcagcccagccccggcgtggacacgcagatcttcgaagaccctcgagagttcctgagtcacctagaggagtacttgcggcaggtgggcggctccgaggagtactggctgtcccagatccagaatcacatgaacgggccggccaagaagtggtgggagttcaagcagggctccgtgaagaactgggtggagttcaagaaggagttcctgcagtacagcgagggcacgctgtcccgagaggccatccagcgcgagctggacctgccgcagaagcagggcgagccgctggaccagttcctgtggcgcaagcgggacctgtaccagacgctgtacgtggacgcggacgaggaggagatcatccagtacgtggtgggcaccctgcagcccaagctcaagcgtttcctgcgccaccccctgcccaagaccctggagcagctcatccagaggggcatggaggtgcaggatgacctggagcaggcggcggagccggccggcccccacctcccggcggaggatgaggcggaggccctcacgcccgcccccaacagcgagtccgtggccagtgacccgacccagcccgagtagagggcatcccggggcccccagcctgcccactacatccagcctgtggctttgcccaccaggacttttgagctggggctgactcctgcaggggaagccctggtccagctgggtgccccctcgggctccgggcggactcgcacacactcgtgtcatccagatgtgagcaccgcacccagcggcaaagagccctctcccctgcagggctccgcccatcaccctccctccgtctgtcttcccggcctggacccccccgtccacactctcaggccatcacagaacaccccagcttcctcattctgctacaacgcccaggccgtctggacatccagaaaaccaagtgtccggatggcaggggccagcggccaccaagctcatgggacacccagagcagaagctagggcagagccaacgctgagggagcctcgacttccggcgccgccgccctctcccggcatccgcagagccagctgacgccctccctgcctcccagggcagctggccagcctcgggcagcgcggccccctcctcccaggggagagtagaagtcgcacacgcagcagcagcagacctgatgtcctggtgcttcctggcccctcaggtgagcccctgccccaaggcaacacccactgtggggcatctgagagctggcgggaccgggaggctgctttctaggagagcccactcaggctcgggcccccagcaagttagccaaagggatgggtggggctggcgtcatggaagggggcactggggagagtgggccgggtggaggcaggggcagtttgctgagccagctctcagatggacgcacgctttctctcccccagctccagtgattcacgcctgcctggagaagaatcagagctcagctctgaagaatcagagcaggcggagggtcccagaggggctgagtcctcaaatccggctgaggcagcagccggcaccatcggagccaggagagtgacaacaggtaacggagcgccacccttccacccagaccctaccatcagctgtcccggccaatgagctccttcccagaccccagacaccctggggcccaggccacaccccagcgttcgggcacgctgggaggctctgacagggttggggggctctgccttggaagaccagcgccatccaccggccccagcccctccctgtggagccctggctactgtcctgcatggtccctcactgcccactctcctcttctttcaggtctcaaggttcccacaaagtctttgctgctgtgctgggcaccacccacccctcaccttgcaggctgcctgcgtgggaggcgaagtcccaggacagcccagaggggggctacagagaggagtcggctgcagcagagggcaggacccccagcctagccctgagcgccagcgtgagggccagggcctgccactaagcccgccccgctggccgccagctgccggtccccagagccactgcagcaggagtcgggccctgcctccctcccagcagggaaaccccgcccgctgccaggccatcctctctgctagaggcttcatgagccccaagcctggggccaccgctcctactcctgcccagcagccctgagcccagctgcaggaagaacatcccagaagccattgctcctggggcgcttcccggcattctgccctgccccgacaccagaaccctggtgctggtgggccactagggtctgcagcctgagcaggcgccggctcagggttcatccttctgccttgtccactgggggaccagctccacagaccactctgacaagtcttcggcccacaccctgccagccccacagattttatttttgcacataagccataaccaatcctcaaggctggcacaggctttggggaagccctggagcttgtgaagaccctggaaacctcataaggctgtggccaacccctgccccttgccccctcacagaccaggccttaaatgtcggtccaggccctgtgcaccttaccccaaagacagactctttttgtaagattttgttaataaaacactgaaacttc

SEQ ID NO: 100 - DNA, 6063 bp, Chiroxiphia lanceolata
agttcagccagggaagagaagcagctctttgcatctctagtggaaaagcgttttttggctcgccaacttttacccgaggaggaatcacccggatttttgcagcagctccttcgtgtgtttttctccagcggggacttggtgccgttgaagatcctcagctccggacaagcaacgggattggacaccttatccaactcctctccttcttcctggaggatcctgatctctctgggacacgctgagcacttgagacaggagtttccaactgggtaccgggagaaatttgcctccaactctcagtttgggatccacggggaccgaccggctcgctctgcggtgatttctgatttggttgtgtttgtgtggaaaggtccttggaggggggtttaggagtctctgtgtgtctctcaggaagtgttgtggtggtggtttttgggagccagctccagtgccagggctcataacccagttctttccctgtttgacactcgcacggtcgcagccatgcagttggataatgtcaccaacgcgggcatccactccttccaggggcaccgtggagtggccaacaagcccaatgtgatcctgcagattgggaagtgcagggcagaaatgttggagcacgtcaggaggacccacaggcacctcctgaccgaggtctccaagcaggtggagcgggagctgaagggtttgcagaaatccgtggggaagttagagaacaacttagaggaccatgtcccaactgaaaaccagaggtggaaaaagtccatcaaggcctgcctggccagatgccaggagaccattgcacacctggagaggtgggtcaagagggagatgaatgtttggaaggaggtgtttttccgcttggaaaagtgggctgaccgcctggagtccatgggaggcaaatattgccccggggaccagggcaagcagacggtgtccgtgggggtgggaggccccgagatcaggccaagtgagggggagatttatgactatgccctcgacatgagccaaatgtatgccctgacccctccccccggggaggtgcccagcatcccccagggccacgattcctaccagtgggtctctgtgtcggaggatgctccggcctccccggtggagacccaggtgtttgaggatccccgggagttcctgagccacttggaggaatatttaaagcaggtgggtgggactgaggagtactggctgtctcagatccaaaaccacatgaacggcccagctaaaaagtggtgggaatacaagcaggactccgtcaagaactgggtggagttcaagaaggagttcctgcagtacagcgaaggcaccctgactagggatgccatcaaaagggagctggatttgccccagaaagagggggagcccctggatcagttcctttggcgcaagagggacttgtaccagaccctctatgtggatgcagatgaggaggagattatccagtacgtggtaggaaccctccagcccaaactgaagcgcttcctgagctaccccttgcccaagaccttagagcagctgatccaaagagggaaggaggtccagggcagcatcgagcactctgaggagcccagcccacagaggacccccgagatccagccgggggattccgtggacaccgtgcctccctcaaccactgccagtcccgtgccgagcaacgggacccaacccgagcagccccccagccccccagccactgtcatatgagctgctctgcagtgctctgggtgaagtgaaagggagaagggggcttatttaggaagcttctccttggagagaggctctggctgagacgggacatgaggtgtgctcagcccaagagcccagggcagaggggttgttaactttgctcgcggggggagggaggtggtggggcagaggcaccttagggtggggttgcccacctcagctgagccctgcaaggcgggggtgctggagaccccgctggcaccactggggggaacagaccattttatgagatccctgatgagaaaccagagacaattcccaacttctgaagcagccgctcgacactggcggctctccaggacttcacaggagtgcagcaattggctgagggttcctacccatctggatctctccttttccttctctcctccctcttttgaggaggtgtccctgtcctgaggacacagctttcttttgacccttgcctgtttctgattaaccaccaggcttctgctctctttgcaatctcctgctcttacttgctccaaaggattaaattaatttttttgattatttttttgttttgtgaagaaaaaaaatcctattacttcaggaattgaaagctttaagagtctggattatttttgatgtttttcatttctctgtacctaatacctgctttaatgtgtttcctctcgagaggctttattggtttactccttgtctgagtttctgctcattccaatcaaggccactgcagtgcagaggcaaatttctccctttccctgcacattatcctgtgcattcagcaggaaacagatttcctaattaaattgtgggctcatttattgaaggagcagtctgcttcctttcagggagagcattcaggtggagagaggagacaccagagctcttttgagagggtggggggagggaagggaaatccaaatccttattctttgaacaaaacaaacacatcccaaattcagagcaaaacatccccagagcagcaaatcgagtccatgctgatgtgtggaggtaacaggagcttttgccatgtaaaagcaaagagaagtgaagagaggacgtgtgtgcccagcacagcctcagcaaagagtttctgctcacacagacaggctcaaaatgctcttggaaagcctggaatccctgtcctggagcacctgtggacagagcagtgtctgctcacaaagaactttctacaacatctgtccatggatggaggtggacttggacttggtgactttttccgtgtggaggcagtaaatgctcagcattcatctgtggccagagtttgaggatgggacttaagagatgaaagacattcatgaagtttggctcttcgaagcttctggaggctggagcaccatctggagcatcatctgcattcaccaccagctcaaatgaacagcgcctgtgcaggagatggagcagggatgcagcagcaggagtgaccctgggatgctcctggcactaccacagcagggacacgtggcactggtggctcagaaggccttgggtgtgactccttccaagagactgaaggtaaggggacttcctgcattctcttctcagacctaaattagccatggcccatccagtaggaagcttgtactggaataaaaactagtctggaatgggacacgaagcattagggttgggaggaaggggaagggagaggcagtcaaagggaaatgcaggacaaggagtgggaaaagtttccaaagagggcagcatcttgcactttctcataaagacgaggaggaaatgggaagcttcttcattagctcaccctgaggacctgccacgtgaagctctgggctgggataacaaccacaggtccatgcacagcccgaaggacgtgcaggtctgctctgcagccctgttaggagcctgtcttgggaatgtgggggctctcctctcactttttgggagtgagttggtttgtgagcagctctgggagcatttctcactaatgccctgggatgagtgatgggggagtgggtgtcactgctgaggatgagctggccatgcattacaaacattatctcctcttggttgcagtgactcactcagatcctcctctgagaaggaatcacttcacagcactcaggatttggaaggaaggcccagaaaaaccttcaaacccaaggatttgacatcagacctgctctcagggtccacagccaccagctccaccagctgaaggaaagactggcacaggtaattacctcccatcttaccctgtgggcctttcagcctccccagtgccctgagatattggacagcccaggtacaaacatctgtgctggtcctgagacctcaaccctggtgattgcaagaggttgacaccaccaaagaggtggcatttcagcttcttggggtcagaacccaagcaccagccccaattaatgctctggggacagtgcacatcatggctttccctctgctggaccattggcaaatccttggacaccaacacctggtgggtcctccaggctgcagacacttcatgggcacagttaaatttaatctcaactcctgagaaatcccctttattctcctttttagagatctagtcagagctgctgcatttttatttttttttctgttttacagcaatccctgctgctgttgctgagcttccttctctgtgcccaagagctttcccaggaaagaagctgcaggaagacagagggcaaatcctgcaccaaagagcctccctgtgttcaaggtgctgagagtcccagtgaaagggggaagctacttccaacagcacgaagaaaagtctgagctgatccagatattctgagcacagaagaaagtgctgagaatggaaagagaagtcaagagaccagaagagaagaaccaagtgcaggttttggggacagcaaggatgctgggcttgtgctgactgtgtgttgagatgacaccaaacctctgtgatttggggccgctgggactcacctaaagaactcttcaccagattatcagctctaaaaaactttcctgattaactttgccaaaaggctgacccttcttaggctacgaaccctccaggctgtcaatgctgtaactcatttttcctgagtttttcggggggagcttcatttcatgcgggtacaagtttcaaacctcaaagggctccagaggttcggagaagcatcccggtgctcctgatgcttgtctgaactcttggagcctgcacaactgtcttgccagagtgttgggaggcagcaggagctctctggatctgcatgggccagagttactgcaagaactggggttcttgtgctggctctggggggactgtttccatccagacccagggagcccaaagggatgagtgagttggacgaggcaattttgcttcatatctcagctcaagaggtccagttggttcctctctcttccagagccaactgtcctgggggtgtgtgggtgtgtgtggatgtcgttgtgggggtgtgtgtcaggcaaacaaatccacctcagcccagttctggggtggacccagggtacattccaacaaggctcagcaaaaatgtccgggaccagaaaattctggaaaaccatgtcaagccagactccacaggcatcatctcaaggtcagaatgatgtttgattttgaggtgcttaattttcacagtccctttcaagggacttgactgcctcactaggcattttatttttttttcccataggctttcctgcctttttaatgaattagcctgtctgtgctacttggttgtttggtcctgaggtttatacattttcagctgcctttttggagtgtgaagaactgaatctcctggactgattttatttcacctggtgctcctggcaaactggagctttacttgtagcaccctggtttatattaccagcctccccaggaagggctggtagtttattttcctggggcagagccacatgaatgaagaagtgtgtatgtgttttgtctctgaaacttcagcagatttcaaccactgcgcttttttttcctccttaggtggttttacatttgaactctgacaaaacttctttagagttttttatttttactagagatcttcttaattcaagcaaccttgtgcaaaaggcaaacccattgactcgctgcaggttataggggttgaagccaaaggtctttgtaagccgacatcacctgctctggatctgactgtatcaggcagtttattcctcatgtgtcatgttggagctacaagatcaccccaagccactagaacctgtcaatagaatagtgctacactctatttgctattgtagcaaagccttttgtagatttatacaataaaactttgaaatattctgcttcaa

SEQ ID NO: 101 - DNA, 3469 bp, Phocoena sinus
gcgcagagctcgggtgccgggtcctccgggtccgcggccgccgagagcagccggggccagccgccgctccgcgggaccctccgccacgcgcagctccgcgtagccggcgcccagcagctctccgtcggccccaagaggactttgcagcctctaccccaccccgcctgtccgagcaccgccgccacctgcgaacagatggagctggaccaaaggacgaccggcggcctccacgcctaccccgcgccccgcggcgggccggtggccaagcccaacgtgatcctgcagatcgggaagtgccgggcggagatgctggagcacgtgcggaggacccaccggcacctgctgaccgaggtgtccaagcaggtggagcgggagctgaaggggctgcaccgctcggtgggcaagttggagagcaacctggacgggtacgtgcccacgggcgactcacagcgctggaggaagtccatcaaggcctgcctgtgccgctgccaggagaccatcgccaacctggagcgctgggtcaagcgggagatgcacgtgtggcgggaggtcttctaccggctggagaggtgggccgaccgcctggagtccatgggcggcaaatacccggttgacggcaacccctcccgccacaccacctccgtaggtgtcgggggtcccgagagctacggccacgaggctgacacctacgactacacggtcagcccctatgccatcaccccaccaccggccgcaggtgagctgcccggacaagaggcggtggaggcccagcagtacccaccctgggggctgggagaggacgggcagccaagccctggcgtggacacgcagatcttcgaggacccgcgggagttcctcagccacctggaggagtacctgcgccaggtgggcggctccgaggagtactggctgtcacagatccagaaccacatgaatgggccggccaagaagtggtgggagttcaagcagggctcggtgaagaactgggtggaattcaagaaggagttcctgcagtacagcgagggcgcgctgtcgcgagaggctgtgcagcgcgagctggacctgccgcagaagcagggagagccgctggaccagttcctgtggcgcaagcgggacctgtaccagacgctgtacgtggatgctgaggaagaggagatcatccagtacgtggtgggcaccctgcagcccaagctcaagcgcttcctgcggcccccgctgcccaagaccctggagcagctcatccagaagggcatggaggtgcaggacggcctggagcaggcggccgagcccgccagcccccgcctgcccaccgaggaggagagcgaggccctcacaccagccctcaccagcgagtctgtagccagtgaccggacccagcccgaatagagggcgccgcccccgcctgcctgccgtggcctttgcccaccgggacttctgagtgggctgatccctgcagggggagcccttgtcctcatgcagctggacaccccacctcagcctcctagcctgaccctaacagacacgtgtgattcagatgtgggcagcgtcccccaaacagcagaggggcttcccttccctgcggggccctgcccctcgccctccctcggtctgtcttccccagcacgggccggcctgggccagcggccccaccctccatactctcaggccaggacagcttcctcgtcctgttcaacgtcccggccctctgggcactcagaagcccagcatccagacggcacgggcccgcaggcaccaagctcaagggacaccccggggcagaagctctgggcttctgggaagccacctctcctggcagttgcctcgtagccgactggcacccctgccatggcccagggcagctggccagcctcgggcagtgtggctccctccccctggaagagagccgaagccaataaaggcagcagcagcagtggcagcagcagacctggcgtcctggtgcctcctggcccctcctggcccctcaggtgagcccctgccccatggtaccaccaccagggggcaccgtagagccgggagggtccgggccaagcccactttccaggcgagcccacgaggctcagggtcatccgcaagttaccggatggggtgggggtgacatggtggggaggcggagaaggagcagagacccgggggagccgggagagggagctggggtgggagcagggctgggggagtttgccgagccagctctcacaccgaccgtgttttctctcccacctcagcaccactgattcatgccagcctggggagggaccgagccccgctcgatgactcacccgtggcaggcggaaggtcccacagggcctgagtcctcaaacccggctgaggcagcagccggccctcggagccaggagagtgacaacaggtaatgcaggagaccccgtccctcggctgtcctcacacggggccctcaagctcctccccagcccccaggtcccaggccgcccccccactcccgcagtcctctgggtgagctgagaagcagccctgggagagcagccctgtgacgcctgccgcgtgcccctcccgtgcagcccctcccggccgtggcctgttcctgagtccctgaccatccgtcttccttcctttcaggtctcaaggctcctgcggagcctttgctgctgtgcctggcagtgcctcctctcctctccccctgcaagctgcctgcacgagaggagaagtctgaggccggcgagaggctgggggtgaagacgcgccagcgtgagggccggggcctgccgctatgcccgccccgctggccgcccgcccgcccacccgcccccagggccgccaccccgggtccggcctcgctccagcccaggaaccgctgcccactgcgcggccatcctctcttgccagagcttgccgcgaggcctggggctgagaccagagccgctgcctctgcctggcggccccaagcccagccccgggagacccggcggcctttgctcctgaggctcatgtgggctctctaccgggccctgccgttgcccaggcctggacccccgcctcccccagggcgccaacaccctggtgctggccggccgctcgtgtctgtggcccgagcaggcctggttgggggttgcctttcccctttctgcctgtccgctgggggccccagcttcgggggaatgacacttacaggtaactctgccagctcccccagccccctttctgcctgtccgctgggggcccagcttcgggggaatgacacttacaggtaactctgccagctcccccagattttatttttgcacataagtcataacccatactccgaggctggtgcaggcagcagggaggccccagggtcgagagggtgtggccaactccccgtccccccagtggatcaagccctgaacgtcaggccaggctgtgtgcacccttgccaccttacgcgaagacagactctttttgtaagattttgttaataaaacactgaaacttc

SEQ ID NO: 102 - DNA, 3430 bp, Phoca vitulina
ctcggcgccgcggctctccgctcttcaccgctcctccgcgctcttccgcgctctgtcgccgccgccgccgctgctggaccgaagggaccgtcctggctccaccgcacagccggtccacgaggacttcgcagcctgccgcctctcgccagtccgatcgccgcggccacctgcgcacggatggagctcgaccacatgacgagcggcggcctccacgcctaccccgggccgcggggcgggccggcggccaagcccaacgtgatcctgcagatcggtaagtgccgggccgagatgctggagcacgtgcggaggacccaccgacacctgctcaccgaggtgtccaagcaggtggagcgggagctgaaggggctgcacaggtcggtggggaagctggagagcaacctggacggctacgtgcccaccggcgactcgcagcgctggaagaagtccatcaaggcctgcttgtgtcgctgccaggagaccatcgccaacctggagcgctgggtcaagcgggagatgcatgtgtggcgggaggtcttctaccggctggagaagtgggccgaccgcctggagtccatgggcggcaagtacccggtgggcaatgatcccgctcgccacaccgtctccgtgggcgtcgggggtccggagggctactgccaggaggcggatggctacgactacaccgtcagcccctacgccatcaccccgccgcctgccaccggcgagctgcccgggcaggagcccgtggacgcccagcagtatccgccctgggggcccggtgaggacgggcagcccagccccggtgtggacacgcagatcttcgaggatccgagggagttcctcagccacctggaggagtacctgcgacaggtgggcggctccgaggagtactggctctcgcaaatccagaaccacatgaacgggccggccaagaagtggtgggagttcaagcagggctctgtgaagaattgggtggagttcaagaaagagttcctgcagtacagcgagggcacactgtcccgggaggccatccagcgggagctggacctgccgcagaagcagggggagccgctggaccagttcctgtggcgcaagcgagacctgtaccagacgctctatgtggacgcggaggaggaggagatcatccagtacgtggtgggcaccctgcagcccaagttcaagcgcttcttgcgccatccactgcccaagaccctggagcagctcatccagaggggcatggaagtgcaggatggcctggagcaggcggccgagcccgcgggcccccgcctccccaccgaggatgaggccgaggccgaggcgctcacgccagccctcaccaacgagtctgtgaccagtgacccgacccagcccgaatagaggccagcccgggccccagcctgcccaccacaccccgcctgtggcctttgccaaccaggactgtcgagctgggctgagtcctgcacagcggagcccctcatcctcacctggctgggcacccaacctcagcctcccagcctgactcacacagacacatgtcatccagctgtgggcagtatcccccaaccagcgaagggcccctgccccgtcaccctccttctgtctgtctttcccggtctctgaccccatcctgcacactctctggccaccccaggacctcccagcttcggtattctgctcaaccccccgggccccctgggcactcagaaatcaaacgtccagatggcccaggccagtgagccccgagcccaagggacaccccagagcagaagctaaaacatcagcagcaccccaggaaccttggctttggggcgccgccttcccctggcagttgctgggcagccggctggcactcttgccgccgcccagggcagccggccagccgcaggcagcgaggctccctcctgctgccgaaagccagagcctctggagcgaccgaccactgcggcggcagccccgcgacggcagcagcagacctggcgtcctggtgcctcctggcccctcaggtgagctccggccccaaggcacccccgccagggggcactgtggggtagggagggccccggggccaggtcagccccagcaggttagctgcagggatgggttggggggggggcgctgcagcagggagttgtggggaaggagcagagaccccagggatcggggagaagggccgggctgggcggcggggcggcgggacggtggagccggctctcacacgaccccgtgctctctctctcctcagcaccagtgattcaccccagcctggaaaaggttcggctgggctggatgactcacccgcagccgggggagggtctcacagggcctgagtcctcaaactcagctgaggagccaggagagtgacgacaggtacagcccgctctctccactgagaccccgtccctgctcccccccccccccgcaggatcccaggcccggtgccccccaacacagtgctctgggcaagctgagaggcagcccagcatggcggcttggccctgggggagcagccccgtagtgtccatcccgtacccctcctgtgcagcccctcccagcctgtggcctctctgaccacccccccaccctgtctttctttcaggtctcaaggctcccacagagccttcgctgcggcgcctggcgtgcccctccctctcctcctgcaagctgcccacacaaggagacgctgaggtccgcagaggagctgcagagagggtgggcccggcagagagctggtgatgaagacgggccagcgtgagggccagggcctgccgctaggcctgccccgctgaccaccagcctgcctgcccccacggccgctgtggctggaggcggggtctgctacctcgggccctgtctcgctccagcccaggaacccttgcccacggcacggcggccatcctctcttgccagagctttccaggagctctgaggctgaggccccagccccagcccctgcccgcagccccaggcccagccccaggagatcccagaagccttgcacctggggcttaggcaggctctctgccaggccccgccatagccggggcccagacccccacctcccccggcaccaacgccccggtgctggccggccactcgtgtctgcagcccgagcaggccctggctgggggttctcctttctgcctgtccagtgggggttcccagattcaggggactgatggctgcaggtgactctgtcagcccctccatcctgcacccctgccagcccccccagattttatttttgcacataagccataacccatactcaggctggcataggctgcagggaggccctggggtcctcaagagggtgtgaccagtcctcccccgtccccagcgggtcaggccttcagtgtcgggccaggctgtgtgtacccctgtcaccttacctgaagacagactcttttgtaagattttgttaataaaacagtga

SEQ ID NO: 103 - DNA, 3408 bp, Mustela erminea
cgcggctccccgctcctctccgcctgcccgcgctctcccgcgctccgccgccgcagcgccgggaccgaagggaccctctcggctgcaccgcaccgccggcccagcaggacactgcagtccgccgcctcgcgccagtccgaccgccgcggccacctgcgcaccgatggagctggaccacaggacgagcggcggcctccacgcctaccccgggccgcggggcgggccggcggccaagcccaacgtgatcctgcagatcggtaagtgccgggccgagatgctggagcacgtgcggaggacccaccggcacctgctgaccgaggtgtccaagcaggtggagcgggagctgaaggggctgcaccggtcggtcgggaagctggagagcaacctggacggctacgtgcccaccggcgactcgcagcgttggaggaagtccatcaaggcctgcctgtgtcgctgccaggagaccatcgccaacctggagcgctgggtcaagcgggagatgcacgtgtggcgggaggtcttctaccggctggagaagtgggccgaccgcctggagtccatgggcggcaagtacccggtgggcaacgagccgtctcgccacaccgtctcagtgggcgtcgggggtccagagggctactgtcaggaggcagacggctacgactacccggtcagcccctacgccatcacccctccgccggctgctggggagctgccaggacaggagcccggggaggaccagcagtacccgccctgggggagcagtgaggacgggcagccgagccccggcgtggacacgcagatcttcgaggacccgagggagttcctcagccacctggaggagtacctgcgccaggtaggcggctcggaggagtactggctgtcgcagatccagaaccacatgaacgggccggccaagaagtggtgggagttcaagcagggctcggtgaagaactgggtggagttcaagaaagagttccttcagtacagcgagggcacgctgtcccgggaggccatccagcgggagctggacctgccgcagaagcagggggagccgctggaccagttcctgtggcgcaagcgggacctgtaccagacgctgtacgtggacgcagaggaggaggagatcatccagtacgtggtgggcaccctgcagcccaagctcaagcgcttcctgcgccacccgctgcccaagaccctggagcagctgatccagcgaggccgggaagtgcaggacggcctggagcagggggccgagcccaccggcacccctgtccccaccgaggatgagcccgacgccctcacaccggccctcaccagcgagtccgtggccagtgaccggacccagcccgagtagaggccagcccaggccccggcctgcccaccggaccccacctgtggccttcgccagccaggactgttgagcttggctgacccctgcacggggagcctctcttcctcacccggctgggcacccgacctcagcctgccagcctgactcccacagagacatgccgtccagctgtgggcggcaacccccacgcagcaaagggcccccgccccgtcacctgccttctgtctatctttcctggcctccgatgcccccatccactccctgcacactctctggccaccacaggatctcccagcctcgttctgctcacccccaccgcccgccccctgggcactcagaaatcaagtgtgcagatggcccagtccagtgagcgccaagcccaaggggcagccccagagcagaagctgagacagcaccagcgccgcctccctctggggcagttgccgcgcagccggctgcagccggcggctggcactcttgccgccgcccagggcagccggccagcctccggcagcggcgagcctcgctcctgctggcagaaagccagagtctccggagcctccggctcggcggcagcagcagcagcagcagcagcagcagcagcagcagctccgcggctgcagacctggcgtcctggtgcctcctggctcctcaggtgagccccagccccgaggcacccccaagagggggcactgtagggtagggaagggcctggccccaggggaggggtgtccccagcaggtcagctgtaggggtggggtgggaggctgcagcgtgcagtggtgggaacggagcagagaccccagggatctgggaggaggctggggtgggcgccagcgcggtgggaaggcagagcctgcgctcacaggaccccgtgctctctctccttggcaccagtgatccagcccagcctggaaaagaatcgcctgggctccaggactcactgcggagggtcccacggggcctgagtcctcaaactccgctgaggagccaggagagtgacgacaggtacggtggccccttctctcccatggagagtccctgccccgccactcccctgccccaggatcccaggcccagcgccccccagcccagtgctctgggcactgagaggcagcccacagtgggggcttggccctgggggagcagcagccccagaactccccccacccccagccctcctgggcagcctctcctagcctgcggtccatgtccctgacagcctgtgtctttcttccaggtcttaaggctcctacagagccttcgctgctgagcctggtgcagtccctccccctccccccgcaagctgcctgcacacaagaaggagaccccgaggtcagcagaggcgccgcagagagggcgcgaccggcagagagctggtgatgaagacatgccagcgtgagggccagggcctgccccgctggccaccagcctgcccgcccccatggccactgtggctggagttggggcctgctactgcagggcctgtctcactccagccccggaagccctgcccacggcacggcggccaccctctcctgccagagctttccaggagatttgaggctgaggccacagccccagcccctgcccacagccccaggcccgggccccaccgcaggagatctcagaagccctgcacccggggtttaagggggctctctgccaggccccaccactgctggggcccagacccccagctctgccggcacgaacgccctggtgctggccggccactcatgtctgcaggccaagcaggccctggctgggggttctcctttctgtccagctggtggggggttccagatttaggagaatgatggctgccagcccctccatcctgcacccctgccggcgcccccccccagattttatttttgtacataagccataacccaggggtgcagggaggccctggggtcctcagtagtgtgtgtggcctgtcccccccccacccggcgggtctggccttgaatgtagggccgggccacgtgtacctcatcaccttacctgaagacagactcttttgtaagattttgttaataaaacaatgaaac

SEQ ID NO: 104 - DNA, 3469 bp, Sapajus apella
cagcgtcctccgtccgccgcagccgagcgggacctgcctctccgggcgcgcttcgccagccccgtcgccggcccgcagagacagtcaggcgctccccgcagctccgcacgggacccaggccaccgggctccgccgccggacccagcgccccccaccccgtccgccccgacgagtttgccgcccgtgcgagcgccggcctctgtgagcagatggagctggaccaccggaccagcggcgggctccacgcctaccccgggccgcggggcgggccggcggccaagcccaacgtgatcctgcagatcgggaagtgccgggcggagatgctggagcacgtgcggcggacgcaccggcacctgctgaccgaggtgtccaagcaggtggagcgcgagctgaaggggctgcaccgctcggtgggcaagctggagagcaacctggacggctacgtgcccacgggcgactcgcagcgctggaagaagtccatcaaggcctgcctgtgccgctgccaggagaccatcgccaacctggagcgctgggtcaagcgcgagatgcacgtgtggcgcgaggtgttctaccgcctggagcgctgggccgaccgcctggagtccatgggaggcaagtacccggtgggcagcgagccggcccgccacactgtctccgtgggcgtggggggtcccgagagctacggccaggaggcggacggctacgactacaccgtcagcccctacgccatcaccccacccccggccactggtgagctgcctggccaggagcccgccgaggcccagcagtaccaggcgtgggtccccggcgaggacgggcagcccagccctggcgtggacacgcagatcttcgaggacccccgggagttcctgagccacctggaggagtacctgcggcaggtgggcggctctgaggagtactggctgtcccagatccagaaccacatgaatgggccggccaagaagtggtgggagttcaagcagggctcggtgaagaactgggtggagttcaagaaggaatttctgcagtacagcgagggcacgctgtcccgggaggccatccagcgcgagctagacctgccccagaagcagggcgagccactggaccagttcctgtggcgcaagcgtgacctgtaccagacgctgtatgtggacgcggacgaggaggagatcatccagtatgtggtgggcaccctgcagcccaagctcaagaggttcctgcgccacccgctgcccaagaccctagagcagctcatccagcggggaatggaggtgcaggacgacctggagcaggcagcagagccggccggccccggcccccacgtccctgccgaggatgaggccgagaccctcacgccggcccccaacagcgagtctgtggccagtgaccggacccagcctgagtagagggcagcctggagcccccagcctgcccaccacatccagcctgtggctttgcccaccaggacttttgtgctggggctgactcctgcaggggaagccctggtccagctgggtgccccctcgggctccggcctgacttgcacctacttgtgtcacccagatgtgggcaccgcacccatcagcaaagagccctcccccctgcagggctccgcccgtcaccttccctctgtctgtcttcccggcctggaccccaccctccacacactcaggccatcacactacaccccagcttcctcattctgctacaacgcccaggccctctgaacatccagaaaaccaagtgtcgggatggcaggggccagcggccaccaagctcatgggacaccccgtagcaggagctagggcagagccagtgctgagggagcctcgacttccggcgccaccaccctctcccggcatccccagagccagcagacgccctccctgcctcccagggcagctggccagcctcgggcagtgcggtcccctcctcccaggggagactggaagtcaaaaacgcagcagcagcagacctgatgtcctggtgcctcctggccccacaggtgagcccctgccccaaggcaccacccaccgtggggcatctgagagctggcgggacccagaggctgttttctaggagagcccacccagctggggccctcagcaagttagcagaagggatggggtgggggtggtgtcatggagggggcatcggggagagggggccgggtgggaggcaggggcagtttgctgagccagctctcacatagacccgcgctttctctcccccagctccagtgattcacacccgcctggagaagaatcagagctcagctcatgactcagccgtggcaggcggagggtcccagaggggctgagtcctcaaatccggctgaggcagcagccggcaccctcggagccaggagagtgacaacaggtaacggagcacccccctcccacccagaccccaccatcagctgtccctgccaaatgagctcctccccagaccccagacacccgggtcccaggccactccccagtgcttggtcaagctgggagactctgacagggtcggcgacttctgccctgggagagcagcgccctctgtcatccccagcccctccctgtggagcctgcatcctgcctggcccctcaccgcccgcctggcccgtcaccacccgcctggcccctcaccgcccgctctcttctcctttcaggtctcaaggatcccacgaagtctttgctgctgtgctgggcaccacccacccctcaccctgcaggctgcctgtgtgggaggcaaagctccaggacagcccagagcggggctacagagaggagtcgctgtggcagagggcaagagcccagcttagccctgagcgccagcgtgagggccagggcctgccgctaagcccgccccgctggccgccaactgcccgccccagagccactgcagcaggagtcggggtcctgcctccctcccagcagggaaaccccgcccgctgccaggccatcctctctgccagaggctttcatgagccccaaggctgggcccaccgcccctactcctgccaggaaccatgagcccagagcccagctgcaggaaggtgatcccggaagcctttgctcccgaggcgcttccaggccttcctccctgccccgacaccagcaccctggtgcgggcgggccacaagcacctgcagcctgagcaggcgctgggcagggctcatggtccgcctcgtccgctgaggaaccagccctcggaccactctgacaagccttcagcccacaccctgtcagccccacaaattttatttttgcacataagccataaccagccttcacaggccggcacaggttttggggaagccctggagcctgtggagaccctggaaacctcacaagggcgtggccagccctgccccgtgccccacacagaccaggccttacatgtccgtccaggccctgtgcaccttaccccaaagacagactcgttttgtaagattttgttaataaaacgctgaaacttc

SEQ ID NO: 105 - DNA, 1230 bp, Thamnophis elegans
atgttgcaggtggaaaacgtcaaccatgggaatctccattcctaccagggtcatcgtgggatggccaacaacaagcccaatgtcatccttcagatagggaagtgcagggctgacatgttagaccacgtgaggagaacccaccgacacctcttgaccgaggtgtccaagcaagtggagagggagctgaaaagcctacagaaatcggtggggaaactggagaacaatctagaagaccacgttccttcagccgcggagaaccagaggtggaaaaagtccatcaagtcttgcctggctagatgccaggagaccattgctcacctggagaggtgggtcaagagggagattaatgtctggaaggaagtctttttccgcttggagaaatgggcagaccggttggaatctggtgggggaaagtactcccatggggaccagggcaggcaaatggtctcggtgggagtagggaccccggaaatccaacccagcaaagaggagatttatgattatgccttagacatgagtcagatgtacgccctgacctctcctcctattggggaagaccctagtgtgccccagccccatgactcctatcagtggatcactgtttcagatgatgccccaagctctccggtggagacccagatctttgaggatcccagggaattcctgactcatctggaggattatctgaagcaggtgggcgggacggaggactattggctctcccagatccagaaccacatgaatggccctgctaaaaagtggtgggaatacaagcaggactcggtcaagaactggctggagtttaagaaagagttccttcaatacagcgagggcaccttgaccagggatgccatcaaacaggagctggatctcccccagaaggacggggagccccttgaccagttcctttggcgcaagcgggacttgtaccagaccctctacatagatgctgaggaagaggacgtcatccagtatgtcgtagggaccctccagcccaaactcaagcgtttcctcagccacccctaccccaaaaccttagagcagctgatccaacggggcaaggaagttgagggcagcctagataattctgaggagcccagtccccagaggtcccccaaactccagctaggaggatcggtggagagtctgcctccttcttctatggctagccccgttgctagcgacgcaactcatgcagatgtttctgccccaccagtcacagtgatctga

SEQ ID NO: 106 - DNA, 5992 bp, Aythya fuligula
tcctctcctcattcctggaagatcctggttctctctgggacaccctgagcacgtgagacaggcgtttccagcagggcaccgggagaaatttgcctacaactctctctgagatccacggggaccgaacagctcactctgcggtgatatctgatttggttgtgtttgtgtcgaaaagtcctttgaggggggtttagaagtctctgtgtgtcttttgggaagtgttgcagtgggggttttgagagcaggctctagtgccggggcttacaacccagtttttttctgtgtttgacacttgtacggtaggagccatgcagctggataatgtcaccaacgcgggcatccactccttccaggggcaccgtggagtggccaacaagcccaatgtgatcctacagatagggaaatgcagggcggaaatgttggagcacgtcaggaggacccaccggcacctcctgtccgaggtctccaagcaggtggagcgcgagctgaagggcttgcagaaatcggtggggaagttagagaacaacttagaggaccacgtcccgactgataatcagagatggaagaagtccatcaaggcctgcctggccaggtgccaggagaccattgcccatctggagagatgggtcaagagagagatgaatgtttggaaggaggtctttttccgtctggagaagtgggcagaccgtctggagtccatggggggcaaatattgccctggggaacatggcaagcagactgtgtccgttggggtgggaggcccagagataaggcccagcgagggggagatttatgattatgcccttgatatgagccaaatgtatgcgctgacccctcctcctggggaggtgcccagcatcccccagggccacgattcctaccagtgggtctctgtgtcagaggatgctccagcctccccagtggagacccaggtctttgaggatccccgggagtttttgagccacttggaggaatacttaaagcaggtgggtgggacagaggagtactggctgtctcagatccagaaccacatgaacggcccagctaaaaagtggtgggaatacaagcaggactccgtcaagaactgggttgagttcaagaaggagttcctgcagtacagcgaggggactctgactagggatgctatcaaaagagagctggatctaccccagaaagagggggagccccttgaccagttcctctggcgcaagagagacttgtaccagaccctgtatgttgatgccgatgaggaggagattatccagtatgtggtaggcaccctccagcccaaactgaagcgcttcttgagttaccccttgcccaagaccttagagcagctgatccaaagagggaaggaagtccaaggcaacatggaccactccgatgagcccagcccacagaggacccccgaaattcaatcaggggactctgtggagagcatgcctccctcaaccaccgccagccccgtgccgagcaatgggacacaacccgagccccctagccctccagctactgtcatatgagttagtccaacagatgatggcaatctgggttatgtgaacgggagaagggggcgaatttaggaagcttctccttggagagaggttccggctgagctgcgacatgaggtgtgctcagtccaacagcccatagcaaaggaatcaactttgctcgtggggggagggaggcgaagggggagaggcaaccttaggatgtggttgcccacctcacccgagccacgccatacggtggtgccggggatgctgcttgcaccactgtgggggacggacaattttataagacccatgacaagaaaccagagacaattcccaacttcagaagcagccgcttggcactggcggctttcaaggacttctgacgagtgcagctattggctgagggttcctacccatctggatctctcctccttctcccctccctctcgtaaagaggttctgagaggacatctttcttctgaccctcgcccatttctaatttaccgctgggcttctgtttacttggcaatctcctcttctgtctcgctttaaaggataaaagatttttatttgtttattttgtttaattaagaggaaatcctgtgacttcaggaaatgaaaaccttaagaatgtgggcaatgtttagtgtttttaatttcagtatacccaatacctgctttaatgtttttcctcccaagaggctgatttactccttatcttagcttttgctcactccaatcaaggccactgcagtgcagtagcaaatttcaccctttctctgcacattacactgtgcattcagcagtaaacagagtttcaaattaaattctgggttattttattgaagggagaatgagtctcctttcagagaagggagggtgtcagggtgaagaaagcaagcaccacagctattttgagagggtgggggggagttagaggaaacaaatccttatactttgaatgaaacaaacaaacacagccaaaattcagagcaaaatatccccagagcagcaaatcatgtccatgctgatatgtggagacaacaggaacttttgccatataaaagcaaatcaacgtgaagagaggagctgtgtgtcccagcacagcctcagcctgtgcatcacgaagaagaatttctgctttcacagacagactgaaatgctcttggaaagcctggcacctctgtcatctgaggacaaagagttgcctgttcacacagaactcactacaacagcccctttgccatggatggagatggacttggactgagtgacattttccatggtgagacagcaatgctcagcatttgccttgctttgaccgaggcttgatgataggactttgagaagaaattgctgtaagatgcaggaagtttggctcttcaaaacctcttgaggctggacacatcttgagcattatctgcattcgccaccagaccaaataagcaacacctctgcaagatgtacagcagggatgcagcgacaggagtgtccctgggatgtccctggcactacaacagcagcaatgtgtgacatcggcagcttggaaggcttttggcatgcctccttccaagaggctgaaggtaagacaactttctgacattatcctctctgcactcaggcctaaattagccttagcctggccagtgggatccttgcactgggataaatgggatatgagcactgtaactggcaaactaggctatggaggaaaaaagggaaggacaatcaaacggaaataaaagacagtgaatacaaaaattttccaaacaggacagcatcttacactttctaattaatggagggagggagtgggaaggaactggcccatgaagccatgggcttgagtgcccagcattgacaacacatcacagggctatgcacagcccaaaggagatgcacctttgctctccatccttgcctagaagtgagtcagtgtcaggaggagtgagggctctcccctcacttgctcagagtgagttagcttgcagtggctgtgtctgcagaaagaagggagcctgacctgggaatgagtggtggaggagtgggtgtcagtgctgaggatgagctggccgtgcattacaagcattatcttctcttgattacagtgactcactcagagcctcctctgagaagaaatcacttcatggtgctcaggtctcggaaggaaagccaaagagaaaagacttcaaaactaagaattcaacaggggacctgctgccaggatccccagctgctgagtgccggatcctctgcctgaatgaaagcctggcacaggtaattacctcccatcctacccctgagagccttttttaacctccccagtgtcctcaggcaagatatgaaataactcaggtgcaaatcagggctgggcttgggacctcaggcccaatggctgtggggggctggcaccatcagataggtgggatttcagcttaatgtgggaacacaagcaccagccccagtgattcaagttctgcggacagagtgtcctgtttttcttcctgctggacctctggcaatgcttagacacctgtttagaggcccaggcacctggtggccacaccagctgaatattaacctatatcctgaaaaatcccctatattctctgtagaacttatttggagactttggaaatctaacctcatctgctctatttttttatttttttttctctaacagaaattcctgctgctgttgctgagtttcctcctctgtgcccaagacacctactttcccaggggagaagcaaacacttctggaagacaagaaggcaaaatgtgcaccaaagagccaaccattccgtgcaattctgtattcaagatgctgagagccagaatgaaagagggagccacttccaacaaggtgaagaaaaggctgagctggttcaactagtccaagagcagaagaaagttctaagaatgaaaagagaaaccaagagaaaagataaaccaagagaaccaggtctgggctttggggacagcaagaatgctggacttgtactgactgtctgttgagatgatgccatacctctgcagtctggggccactgggactcatctaaagaaatcttcactagattatcagattaaaacacaaaaactttcctgattaactttgccaaatgactgaccctctctaggctacgaaccctccatgctgttaaggctgtaactcatttttcctgagtcgagggtcgcttcatttcatgcgggtatcagttttcaaacctcaaacagctctggaggttcggagaagcatcctggggtccagatgcttgtctgaactacttgagcctgcacaactgggccagctgtcttgccaaaagggacacttgtgagacagcaggcgcttcctggatctgcatgggccagagttactgcaagaagtgatgctcttgtggtggctttggcgtgactgcttccatacagacccagggagcaaaaaaaaggtgcatgagagacaacagctcgagtgagttgaaccaagcctttttgcaagacagttttggttcacatctcatttgaagggatcccgttggttcctctctcttccagagccaagggtcccgggtatgtgtgtgcgtgtcagtgcgggtgtgcatgtgtcgagcgatcagatccacttaaccaaattctgcggagttttgttgtgtttgaaccaagccaatgggatatcatgcacattccaacattgctcagccaaaaatgtccaggaccagaaaattatgtgaaaccatgtaaagcagacttcataggtatcatcccaaggtcaaaatgaagtttgattttgaggtgcttaatttccacagtccctctcaagggacctgactgcctcaatgggtattttcaatgtccatagactttcctgccttttctatgagttatcctgcctgaactacttgattatatggtcctgagctttgtacattttccactgactttgtggagtgtgcacaactgaacacccttggctggttttatttcagttattgctcctagctgattggagctttacttgtagcaccctggtttatattaccagcttctccaggaaggactggtagtttgttttcctggggtagagtcacgtgaatgaagaagtgtgtatgtgctgtgtctgtgaaactttagaagatttcaatcactggagatttttttttttccttaggtaattttacatttgactctgacagaactactttagagtttttatttttactagaaatattaataattcaaacaaccttgtacaaaaggcaaactcattgaatcactacaggttataggggttgaagccaaaaggtctttgtaagccgacatcacttgccctagatctgactgtatcaggcagttattcctcatgtgtcatgttggagttacaagatcacaccaagccactagaacctgtcagtagaataatgctacactttatttgctattgtagcaaagccttttgtagatttatacaataaaactttgaaatatctgcttcaa

SEQ ID NO: 107 - DNA, 6118 bp, Corvus moneduloides
gagcctggactagtggcagttcagacagggaagagaagcagctctttgcatctccagtgaaagcggttttgactcaccaagtttgccagaggagaaatcacccggatttttgctgcagcttccagcttctttgtgcatctctgtgtgattttctccggcggggacttcgaggcattcgagattctcagcgggatttgacatcttatccaactcctctccttgttcctagaggatcctggttctctctgggacacccctgagcacgtgagaccggcgtttccagctgggcaccgggagaaatttgcctacaactctctctgggatccacgtggaccgaccagctcgctctgcggtgatatctgattgggttgtgtttgtgtccaaaagtctttggcggggggtttagaagtctctgtgtgtctttcaggaagtgttgtggtgggggtttttgggatccagctttagtgccagggcttataacccacttatttccgtgtttgccacttgcacggtcggagccatgcagctggacaatgtcaccagcgcgggcgtccactccttccaggggcaccgtggagttgccaacaaacccaatgtgatcctgcagatagggaagtgcagggcagaaatgctggagcatgtccggaggacccaccggcacctcctgactgaggtctccaagcaggtggagcgggagctgaagggattgcagaaatctgtggggaagttggagaacaacttagaggaccatgtcccaactgaaaaccagagatggaagaagtccatcaaggcctgcctggccagatgccaggagaccattgctcacctggagaggtgggtcaagagggagatgaatgtttggaaggaggtctttttccgcctggaaaagtgggctgaccgcctggagtccatgggaggcaaatactgccccggggaacagggcaagcagacggtgtccgttggggtgggaggcccagagataaggccaggtgagggggagatttatgattatgccctggacatgagccagatgtatgccctgacccctcctcctggggaggtgcccagcatcccccagggccacgattcctaccagtgggtctccgtgtcggaggatgctccagcctccccagtggagacccaggtgtttgaggatccccgggagttcttgagccacttggaggaatacttaaagcaggtgggtggaacagaggagtattggctgtctcagatccaaaaccacatgaacggcccagctaaaaagtggtgggagtacaagcaggactccgtcaaaaactgggtcgagttcaagaaggagttcctgcagtacagcgagggaactctgactagggatgccatcaaaagggagctggatttgccccagaaagagggggagcccctggatcagttcctttggcgcaagagagacctgtaccagaccctctatgtggatgcagatgaggaagagattattcagtacgtggtaggaaccctccagcccaaactgaagcgtttcctgagctaccccctgcccaagaccttagagcagctgatccaaagggggaaggaagtccaagggaacatggagcactctgaggagcccagcccacagaggacccctgaggttcagccaggagactccgtggagaccgtgcccccctcaaccactgccagtcccgtgccgagcaatgggactcaaccagagccccccagccccccagccactgtcatatgagctcccctgaggggggtctgagttccgtggaagggagaagggggcttatttaggaagcttctccttggagggaggttctggctgagatgggacctgaggagtgctcagtccaatagcccggagcagagggattgactttgctcgtggggggagggaggaggtgggggagaggcgcctcagaatggggttgcccccctcacccaggccatgccatgcggtggtgctggggaccctgctggcaccactgtggggaacagccaattttgtgagaattccctgccaagaaactatagagataattcccaacttgtgaagcagccgctcggcactagcggctctcaaggacttcatacgagtgcagtagttggtggagggttcctacccatctggatctctctttttccttctctcctccctcttctgagagggtggccctgtcctgcagagacagctttcttttgacccttgcctgtttttgattagcctctgggtttctgttcactcagcaatctcctgctcttacttgctccaaaggattaaagtaattttttggattattttttttttaagaagaaaaaaaaatcctattattttaggagctgaaagctttaagaatctgggttattttctgtggttttcatttcactgcacctaatacctgctttaatgggtttcctctcaagaggctcttagtggtttacttcttgtcttagtttctgctcattccagttcaaggccactgcagtgcagaggcgaatttcatcctttctctgcacattatcctgtgcattcagcaggaaacagattttctaattaaattctgagctcatttcttgaaggagcagtctccttcctttcagagaagagagggtgttcaaggtagagagaggagacaccagagctcttttgagagagagtggggggagggaagggaattaaatccttattctttgactgaaacaagcaaacacaccctaaaatcagagcaaaatatccccagagcagcaaatcgagtccatgctgatgtgtggagacaaaaggagcttttgccatgtcaaagccaaaagaagtgaagagaggatctgtgtgccccagcacaatttcagcctgtgcaccacagccaggagttcctgctcacacagacagactccaaatgctcttggaaagcctggcacctctgtcctggagcacctgaggacagagtgttgtctgctcacaaagaacttcctgcaacatctcaccacggatggagatggacttggactttgtgacattttccacgctgagacaggaaatgctcggtgctcacctttggccagcgtttgatgataggactgagagatgaaagacattcctgaagtttggctctccaaagcttcctgaggctggacacatcttgggcagcatctgcatccaccaccagaccaaataatcagcagggatgcagcagcaggagtgaccctgggatgctcctggcactgccacagcggtgacatgtggcactggtggctcagaaggcctttgctgtgactccttccaagaggctgaaggtaaggcagctctctggcattctctcctcagagctaaactggttaccgagtgtccagtagaaaacttgccctgggataaaaactaatctgaattgggatatgaagcattggggttgggagaaagaggaagggagagccagccaaagggaaatacaggacagggactaggaaaagtttccaaagagggcagtatcctgcactttctgattaatgtgggaaaagaatggaaagcttcttaattagcccagccccaggacctgcctcgtccttcatggagaagctctgggcttgagtccccacccagagcagcacatcccaggtcgatgcacaccccaaaggagctgcaggtctgctctgcatccctgctaggagctggtgtcaggaatggtgggagctgtcctctcccttgttcccagtttgtcaacagctctgtgtgcagagaaaggagcatttctcactaatgaccggggctgagtgatgggggagtgggagtcactgctgaggatgagctggccatgtattacaagctgtatctcctcttgcttccagtgactcactcagatcctcctctgggaaggaatcacttcacagcattcagcatttggaagaaaagccacagaaaaatctgcaaaacaagggcctcaccatcagagctgctctcaggaccctcagccaccacctgccagatccaccacctgaaggaaaaatcggcacaggtaattacatcccatattaccctgtgggccttccttaacctccccagagccctgacacaagatattgaacagcccaggttttgaaacctcagccccagtggctgcagcagcctggcaccatcagagaggtgggatttcagcttcttgatgtcagaacccaagcaccagccccaataattgatgctccagggactgcacattgtggctttcccttggctggactatgggcacatccttagatcccaacacctggtgggtcatccaggctgcaggcacagcaaaatttaatcccaactcctgaaaaacttccctttctccccacttccaaaatctaatcagagctggtgcatttttttttttccagcgatccctgctgctgttgctgagattccttctctgtgtccaagaactttcccaagggacaagcgagtgctgcaggaagacagagggcaaatcatgcaccaaagagcctcccatgcagtgcaatgccacgttcaaggtgctgagagccagaatgaaatggggaagccgcttccaacaggacaaagaaaagcctgagctggtccaggtattccaagcacagaagaaagtgctgagaatggaaggacaggccagaacagaagaaccaagtccaggctttggggacagcgggatgctgggcttgtgctgactgtctgtggagaggattcctcacctctgcgatttggggccgctgggacttaccctaaagaaatcttcactagataatgatcctcactgaaaaaaaactttcctgattaactttgccaaggggctgatcctgccttggctacgaaccctccccgctggccgtgctgtaactcacctctcctgagtcgggggtagcttcatttcatgcgggtagcagttccaaacctcaaagggctcctggagtttggagaagcatcccatggtccagatgcttgtctgaactgttggagcctgcatatctgggccagctgtcttgccagcaagaagcctcacgaggcagcaggcgctctctgggtctgcatgggccagagttactgcaagaactggggttcttgtgctggctttggagtgattgtttccatccagacccagggagcccaaaaagagctcgagtgagctggacaagacagttttggttcatctctcagctgaagaggtctagctggttcctctctcttccagagccagctgtcctgggtgtgtgtgtgtgtgtgtggcagtgtgggggatgtgtgcgttgagcaaaaaaatccacattattcaaattctgtggtgttttgttgcatttgaattaagccagagggacctaaggtacattccaacaatgctcagcaaaaatgtccaggactggaaaattccataaaaccatgtaaaggcagattcccaggcatcatcttaaggtctaaatgatatttgattttgaggtgcttaatttccacagtctcttctaagggacttgactgcctcaataggcattttatttttcctgtcttttttagggaattagcctgtctgtgctacttgatcatttggtcctgaggtttttacattttcagctggctttttggagtgtgcagaactgaatcttctggactgatctgatttcaattgttgctcccagcaaattggagctttacttgtagcaccctggttttttattaccagcctctccaggaaggactggtagtttattttcctggggcagagtcacgtgaatgagaagcgtggatgtgttgtacctctggaactttagcagatttcaaccactgcattttttcctccctaggcgattttacatttactgatgaaatgactttagagtttttatttttactagagatattattaattcaaacaaccttgtacaaaaggcaaacgtggaatcgctgcaggttataggggttgaagccaaaaggtctttgtaagccgacatcacctgccctagatctgactgtatcaggcagtttattcctcatgtgtcatgttggagttacaagatcacaccaagccactagaacctgtcagtagaatagtgctacgctcaatttgctattgtagcaaagccttttgtagatttatacaataaaactttgaaatatctgcttcaa

SEQ ID NO: 108 - DNA, 1744 bp, Phasianus colchicus
cagacaagcaggtagagggcacgcgtttggggtcagacgtcttagccaactcctctccttgtgctcctgaaggatcctcgctctctctgggacactctgagcaccggcatttccaagaggagaaatttgcctccaactctctctgcgatccacggggactgaacagctcgctctgcggtgatatctgatttggttgtgtttgtgtcttaaagtcctttgaggggggtttagaagtctctgtgtgttgtttgggaagtgctgtgttgaggtttttaggagcaggctctagggccaaggcttataacccagttctgtctgtgttccatactcatacagtaggagccatgcagctggacaatgtcaccaatgcgggcatccactccttccaggggcaccgtggagtggccaacaagcccaatgtgatcctacagatagggaaatgcagggcagaaatgctggagcatgtcaggaggacccaccggcacctcctgtctgaagtctccaagcaggtagagcgcgagctgaaaggtttgcagaaatcagtggggaagttagagaataacttagaggaccatgtgccaaccgataatcagaggtggaagaagtccatcaaggcctgcctggctaggtgtcaggagaccattgctcatctggagaggtgggtcaagagagagatgaatgtttggaaggaggtctttttccgtctggagaagtgggcggaccgtctggagtccatgggaggcaaatattgtcctggggagcacggcaagcagaccgtgtctgttggggtgggaggcccagagataaggccaagtgaaggggagatatatgattatgcccttgatatgagccaaatgtatgcactgacccctgctcctggggaggtgcccagcatcccccaggcccatgattcctaccagtgggtctctgtgtcagaggatgctccagcatccccagtagagactcagatctttgaggatccccatgagtttttgagccacttggaggagtacttaaagcaggtgggtgggacagaggagtactggctgtctcagatccagaaccatatgaacggtccagctaaaaagtggtgggagtacaagcaggactctgtcaagaactgggttgagttcaagaaagagttcctgcagtacagcgaggggactctgacaagggatgctatcaagagggagctggatctaccccagaaagagggagagcccctggaccagttcctctggcgcaagagagacctgtatcagaccctctatgttgatgcagatgaggaggagattattcagtacgtggtaggaaccctccagcccaaactaaagcgcttcttgagctaccccttgcccaagaccttagagcagctaattcaaagagggaaggaagtccaaggcaacatggaccactcagaagagcctagccctcagaggacccctgagattcagtctggggactctgtagagagcgtgcctccctccaccactgccagtcccgtgccaagcaatgggacacaacctgaaccccctagcccaccagctactgtcatatgagctagctggatggagatggcaatctgggttacatgaaagggagaaaagggcatatttaggaagtttctgctcaaagagaggttccggctgaggcatgacatgaggtgtgctcagtccaacagcccatagcaaaggaattaactttgcttgtggggggagggtggtgaagggggagaggcacctta

SEQ ID NO: 109 - DNA, 3396 bp, Mastomys coucha
ccggtgagcagtcctccagcagccgcagtctctgggcctctccagcttcagcggcgacgagcctgctacactccctaaactcctccggcaccgcgcacctgccaccgccactgccgctgcagccgccggctctgctaccttcaggcttctgcctctgaggagttcttagcctgttcggagccgcagcaccggcaagcagatggagctggaccatatgaccactggcggcctccacgcctaccctgccccgcggggtgggccggccgccaaacccaatgtgatcctgcagattggtaagtgccgagctgagatgctggagcacgtacggaggacccaccggcatctgttgaccgaagtgtccaagcaggtggagcgagagctgaaagggttgcacaggtcggtgggcaagctggagaacaacttggacggctacgtgcccaccggcgactcacagcgctggaagaagtccatcaaggcctgtctttgccgctgccaggagaccatcgccaacctggagcgctgggtcaagcgtgagatgcacgtgtggagggaggtcttctaccgtctggagaggtgggccgaccgcctggagtccatgggcggcaagtacccagtgggcagcgagccggcccgccacaccgtctctgtaggtgtggggggtccagagccctactgccaggaagctgatggctatgactatactgttagcccctatgccatcaccccaccacctgccgcaggagaactgcctgaacaggagtcagttgaggctcagcaataccagtcttgggggccaggtgaggatgggcaaccaagccctggtgtggatacacagatcttcgaggacccacgggagttcctgagccacctggaagagtacctgcggcaggtgggtggctctgaagaatattggctgtcccagatccagaaccacatgaatgggccagccaagaagtggtgggagttcaagcagggctcggtgaagaactgggtggagttcaagaaggagtttctgcagtacagtgaaggcacactctcccgcgaagccattcagcgggagctggacctgccgcagaagcagggcgagccgcttgaccagttcctctggcgcaagcgggacctgtaccagactctgtatgtggacgctgaggaggaggagatcattcagtacgtggtgggcaccctgcagcccaagctcaagcgctttctccgccacccactccccaagaccctggagcagctcatccagaggggcatggaagtgcaggatggcctggagcaggcagctgagccttctggcaccccactgcccacagaggatgagactgaggcactcacacctgctcttaccagcgagtcagtagccagtgacaggacccagcctgaatagaggggccagcccagggtccccagcctgtctgccacacccagcctgtggcttttgccaactaggacttaagctggggctgactcccaaagggacgccctgtccagccagacatctactcacccactggcctgactcacaactgccacacaaccatgctccgtggacagaacatcaagaagcccctctcccatagggctcccacctgccacctacccctcacctgtctgccctggtcttggccccagccccattggcctcaccctctacactctcagaccatcacagaacacctctggcttcctcattctgctccagtgtccagggccctttgggtaatcaagaaaacagatgtctgaaaggcaaaggaaagaaggcaccaaaacccaggggacatcccagtgcagatgctagagcagaatcagagatgctgagggaacctcaacttccggggatggagcccgctcctacagacacagcagatccagctggtgccctagctgcctcccagagcaactggccagtcttgggaggggagctatagccccaaatgcagctgaagcagcagacctgacatcctggcacctcctggcccccaggtgagccctgttccatgtatcttagagctgggggagagggccagaaccaagtccactttccaggagcccttcaaggcttccctggcaaatgagctgcaagggtggagtaaagtggcatcagggtgggcgccattatagtgggcactggtacttcatggtccaaggagggggctgaggtgggggtggttctgggggagtttgctaagccagctcaccggggaccctgtgatttctcaccccagcagtgattcataccagtgaagaaaagcagagctcagctccgtgactcagccatgacaggcggagggtcccagaggggctgagccctcacacccagctgaggcagcggctggagcccacagagccaggagaacaacaccaggtaagagagagagtcttgcctcctatcctgaccaagccccagatcccagccactctccagatttctgggctatctgagaagtcctgacaggccccaggggtatcagctgggagcagggtaacctggtgtccctccgggatctagtggtgagcagttctctaaccatctagctgctttctgtctccttcaggtctcaaggctgctgagaagtctttcctgccatgtctggaacgggcactaccacagcaccagcaccatcccctcctctcttgaagctgcctgcacagaggttccaagacacttttaaggcagagaaaacaggatcacagagaggaggtgcctggcagagggcagcaccccagctcggcctgagagctgaagatgaagacaagccagcgtgcaaccacgggtctgccatgatgcccgccccgctggccactcactagctgcctgccacgagccactgcagcttgagcagggtctgtacccttggccctcctagcacagagcccagctcgctgcgtggcccttggctccccccgccagaaggttgcaggagccttaaggcttgggcctgagcccagcctgatcttcagtgctgtgccccacccagactgggcccagcccagtcccaggagaccccaggccttggctcctaggctgttccaggcacttccctgatctgcctggtgattgcccagctgaaaccttatccatgctccagctccaaccaccttgtgctgtgcacctgtgtctgcagtctgagcaggctttgttgcggttcctccatctgcctggtctattggtattctgagaccagttccactgatgttctgacagatcctccaccctgtgcccctgccagcccccaaaggtttatttttgcacataagccatgacccatattcatttggctggcagagggtgtaggtaggccctggggactagggagaccctggagatctcaagagagtgtggctattccctattttcaccaagccttgaatatccagccaggccatctgccc

SEQ ID NO: 110 - DNA, 2129 bp, Camarhynchus parvulus
agggaggagaagcagctcttagcatctccagtgaaagcggttttcgactcacctagtttgcccgaggaggaatcacccggatttttttgctgcagcttttttgtgcatctctgtgatttttctccggcggggactttgcggcgttccagattcccagcgggattggacatcctatccaactcctctctctctgttcctggaggatcctggttctctctgggactcccctgaacacgtgagaccggcgtttccagcttggcaccgggagaaatttgcctacaactctctctgggatccacgtggacagaccagctcgctctgcggtgatatctgattgggttgtgtttgtgtccaaaagtccttggaggggggtttagaagtctctgtgtgtctctcaggaagtgttgtggtgggggttttttgggatccagctttagtgccaggggcttattacccagttctttctgtgtttgccactcgcacggtcggagccatgcagctggacaatgtcaccagcgcgggcgtccactccttccaggggcaccgtggagttgccaacaagcccaatgtgatcctgcagatagggaagtgcagggcagaaatgctggagcatgtccggaggacccaccggcacctcctgacagaggtctccaagcaggtggagcgggagctgaaggggttgcagaaatccgtggggaagttggagaacaacttagaggaccacgtcccaaccgagaaccagagatggaagaagtccatcaaggcctgcctgatcagatgccaggagaccattgcccacctggagaggtgggtcaagagggagatgaatgtttggaaggaggtctttttccgcctggaaaagtgggctgaccgcctggagtccatgggaggcaaatactgccctggggagcagggcaagcagacggtgtccgtcggggtgggaggcccggagataaggccgagtgagggggagatttatgattatgccctggacatgagccagatgtatgccctgacccctcctcccggggaggtgcctagcatcccccagggccacgattcctaccagtgggtctccgtatcggaggatgctccagcctccccggtggagacccaggtgtttgaggatccccgggaattcttgagccacttggaggaatacttaaagcaggtgggtggaacagaggagtattggctgtctcagatccaaaaccacatgaacggcccagctaaaaagtggtgggagtacaagcaggactccgtcaaaaactgggtcgagttcaagaaggagttcctgcagtacagcgagggaactctgactagggatgccatcaaaagggagctggatttgccccagaaagagggggagcccctggatcagttcctctggcgcaagagagacctgtaccagaccctctatgtggatgcagatgaggaggagatcatccagtacgtggtaggcaccctccagcccaaactgaagcgtttcctgagctaccccctgcccaagaccttagagcagctgatccagagggggaaggaagtccaaggcaacatggagcactctgaggagcccagcccacagaggacccctgaggttcagccgggagactccgtggagaccgtgcccccctcaaccaccgccagtcccgtgccgagcaatgggactcaaccagagccccccagccccccagccactgtcatatgagctcccctcagcggggtctgggttccgtggaagggagaaagggggcttatttaggaagcttctccttggagggaagttctggctgagacctgaggagcgctcggtccaacagcccggagcagagggattggctttgctcctggggggagggaggtggtgggggagaggcaccccaggacggggctgcccccctcacccaggccgtgccatgctgtggtgctggggaccctgctggcaccactgcggggaacagccaattttatgacaattccctgacaagaaactagagacaatccccaacttgagaagcggccgctcggcgctggcagctctcaaggacttcacaggagtgcagcagttggtggagggttcctacccatctggatctctctttttccttctctcctccctcgtctgagag

SEQ ID NO: 111 - DNA, 3353 bp, Globicephala melas
cgggtgccgggtcctccgggtccgcggccgccgagagcagccggggccagccgccgctccgcgggaccctccgccacgcgcagctccgcgtagccggcgcccagcagctctccgtcggccccaagaggactttgcagcctctgccccaccccgcctgtccgagcaccgccgccacctgcgaacagatggagctggaccaaaggacgaccggcggcctccacgcctaccccgcgccccgcggcgggccggtggccaagcccaacgtgatcctgcagatcgggaagtgccgggcggagatgctggagcacgtgcggaggacccaccggcacctgctgaccgaggtgtccaagcaggtggagcgggagctgaaggggctgcaccgctcggtgggcaagttggagagcaacctggacgggtacgtgcccacgggcgactcacagcgctggaggaagtccatcaaggcctgcctgtgtcgctgccaggagaccatcgccaacctggagcgctgggtcaagcgggagatgcacgtgtggcgggaggtcttctaccggctggagaggtgggccgaccgcctggagtccatgggtggcaagtacccggctggcagcaacccctcccgccacaccacctccgtaggtgtcgggggtcccgagagctacggccacgaggctgacacctacgactacacggtcagcccctatgccatcaccccaccaccggccacaggtgagctgcccggacaagaggcggtggaggcccagcagtacccaccctgggggctgggagaggacgggcagccaagccctggcgtggacacgcagatcttcgaggacccgcgggagttcctcagccacctggaggagtacctgcgccaggtgggcggctccgaggagtactggctgtcacagatccagaaccacatgaatgggccggccaagaagtggtgggagtacaagcagggctcagtgaagaactgggtggaattcaagaaggagttcctgcagtacagcgagggcgcgctgtcgcgagaggccgtgcagcgtgagctggacctgccgcagaagcagggagagccgctggaccagttcctgtggcgcaagcgggacctgtaccagacgctgtacgtggatgccgacgaagaggagatcatccagtacgtggtgggcaccctgcagcccaagctcaagcgcttcctgcggcccccgctgcccaagaccctggagcagctcatccagaagggcatggaggtggaggacggcctggagcaggtggccgagcccgccagcccccacctgcccaccgaggaggagagcgaggccctcacgccggccctcaccagcgagtctgtagccagtgaccggacccagcccgaatagagggcgccggccccccgcctgcccgctgtggcctttgcccaccgggacttctgagtgggctgatccctgcagggggagcccttgtcctcatgcagctggacacccacctcagcctcctaacctgaccctaacagacacgtgtgattcagatgtgggcagcatcccccaaacagcagaggggcttcccttccctgcggggccctgcccctcgccctccctccgtctgtcttccccagcatgggccggcctgggccagcggccccaccctccatactctcaggccaggacagcttcctcgtcctgttcaaagtcccggccctctgggcactcagaaacccagcatccagacggcacgggcccgcaggcaccaagctcaagggacaccccggggcagaagctctgggcttctgggaagccacctctcctggcagtcgcctcgtagctgactggcacccctgccatggcccagggcagctggccagcctcgggcagtgtggctccctccccttggaagagagccgaagccaataaaggcagcagcagcagtggcagcagcagacctggcgtcctggtgcctcctggcccctcaggtgagcccctgccccatggtaccaccaccagggggcaccgtagagccgggagggtcccgggccaagcccactttccaggcgagcccacgaggctcagggtcatccgcaagttaccggatggggtgggggtgacatggtggggaggcggggaaggagcagagacccgggggagcgggagagggagctggggtgggagcagggctggggagtttgccaagccagctctcacaccgaccgtgttttctctcccgcctcagcaccactgattcatgccagcctggggagggaccgagccccgctcgatgactcacccgtggcaggcggaaggtcccacagggcctgagtcctcaaacccggctgaggcagcagccggccctcggagccaggagagtgacaacaggtaatgcaggagaccccgtccctcggctgtcctcacacggggccctcaagctcctcctcagcccccaggtcccaggccgcccccaccccacgcagtcctctgggtgagctgagaagcagccctgggagagcagccctgtgacgtccgccgcacgcccctcctgtgcagcccctcccagccttggcctgttcctgagtgcctgaccatccgtcttccttcctttcaggtctcaaggctcctgcggagcctttgctgctgtgcctggcagtgcctcctctcctctccccctgcaagctgcctgcacgagaggagaagtctgaggccagcgagaggctggtggtgaagacgcgccagcgtgagggccggggcctgccgtatgcccgccccgctggccgcccgcctgcccacccgccctcagggccgccaccccggctccggcctcgttccagcccaggaaccgctgcccactgcgcggccatcctttcctgccagagcttgccacgaggcctggggctgagaccagagccgctgcccctgcccggcggccccaagcccagccgcaggagacccggcgggtcctgaggctcatgtgggctctctaccaggccctgccgttgcccaggcctggacccccacctcccccagggcacccacaccctggtgctggccggccgctcgtgtctgtggcctgagcaggcctagttgggggttcccctttctgcctgtccactggggggtcccagcttcgggggaatgacacttacaggtaactctgccagctcccctggattttatctttgcacataagccataacccgtactcgaggctggtgcaggcagcagggaggccccagggtcaagagggtgtggccacctccccgtccccccagcggatgaagccctgaatgtcagaccaggctgtgtgcacccttgccaccttccacgaagacagactctttttgtaagattttgttaataaaacactga

SEQ ID NO: 112 - DNA, 6503 bp, Gopherus evgoodei
acgagctctttatcgctttcacccggcacttggcactcaaagttaacagcagattggaaattgctaggatcttagcaagctgcttctagctgtgtgtgtgtttgagcagagggaactctcggccgatcaagatcccgtactccggacaaggagcggaagacaccggacgtggtaggagatcccaggccgggacgccctctctttcctagacgctcactgccgtgacggtgtcacccgaggcacgtgggaccagcgcgctgggagcagcctgaacgaatttgccaccgactcctgctggctgcaaaggggaccggacagctctccttggggtgatatctgactcggctgtgtttgtgtgaggcgtactttgggaggcaagagggggcggtgtgtgcctttcggcagagaatttaaaagcagggtgggagtgtccctaaattaaaagcccctgggtaaccactagggctttacctctagctctgttgcattgctgcttggtatagcctgctcacgccacaggtaccatgcagctggatagcatcaccaatgggagcgtccacaccttccaggggcaccgtggaacagtcaataagcccaatgtgatcctgcagatagggaagtgcagggctgagatgctggagcatgtcaggaggacccaccggcacctcctcacggaggtgtccaagcaggtggaacgggagctgaaaggcttgcagaaatcagtggggaagctagagaataacctggaggaccatgtcccatccacggacaaccagaggtggaaaaagtccatcaaggcctgcctggccagatgccaggagaccattgcccacctggagaggtgggttaagagagagatgaatgtctggagggaggtgttcttccgcctggagaaatgggcagaccggctggagtctatggggggcaaatatggccccacagaccatgccaggcaaactgtctctgtcggggtgggaggcccggagagcaggggcaatgacggggagatttacgattacgcccttgacatgagccagatgtatgcactgactccctctcccggggagataactagcatgccccagccccacgactcctaccagtggatcactgccccggaggatgctccggcatccccggtggagacccagatctttgaggaccctcgggagttcttgagccacttggaggaatatttgaagcaggtgggagggactgaggagtactggctctctcagatccaaaaccacatgaacggcccagctaaaaagtggtgggaatacaagcaggactcggtcaagaactgggtggagttcaagaaggagttcctgcagtacagcgagggcactttgaccagggatgccatcaaaagggagctggatctaccccagaagcagggggaacccctggacgagttcctctggcgtaagagagacctgtatcagacactctacactgatgcagaggaggaggagattatccagtatgtggtaggcaccctccggcccaaattcaagcgctttctgagtcaccccttgcccaagaccttagagcagttgattcagcgggggaaggaagtcctaagtgacttcgaccagtcagaagagccgaccccacagagaaccccagagcatcagccaggggactcagttgatagcttgccaccttcaaccacagctagtcccattgccagcgatgagacgcaacccgagccccctaccccaccagctacagtgatatgagctcatataagtatgggattggcctgtattatacaaaggtgtggaggggactgatttaggaagcttctccttagcgagaggttctggctgtgaccagtcatggctggactcagttcaatggtcctcagcagaggaatgaactttatttatggatgggccacgtgagaacgtagctgcccacctcacccaagtcatgtgacggggtgggggcaagtctgaggatactattttaaccactgtggggtggacagttttatgatactcccggtaggaagctagacagttcccccctgcagagatagccaccctatgttggcacctttcaaggacttcaaacagatgcagctaatgaccaagagttcccacctacccaccagtctcgtatcctctggagaggggtccccttcctcagtggaacatctttgttttgactcttgcccatctctgccttactgacggggctttgtccacccaagaggaagccactggcttctgcttcccttgcaccctcccaccatagcttcacggaggaaactttttaaaagttcataatggttttgaagtgagcctagagctgcggcaaatggcaactttaatgagtttgatcaattttaccacctgttgttgtatctcacctggcacctgctctcatttttcatcccagtggttctctcccattctcagctctttctctcccctgggtgacccatgccaaaaggctgttgcagcaacaagggaaatttcatcccatgtctgctgctatcacggggagggaagcccaaactcactcccccgccatccctccaggtgacaattcagcacgtgctgtttcaccactagactgggcacaactaaacctttgtttcttgctgcattagtcttctctatctcagattcaggaccaggcagattaatgggaataaaccagagatctttctactttccgggaaatgaaatggggcaatcagacaaggcacaaaagttgtacaggggtaaattcctatttttttatatcaaacaaacacaccctgaactcagagcaaatttcccccaagcagcaaagcaaggcccctccattggagatgccaggacagtaggacatcagcagtccgtttctgtgggactttgccacaggaaagcagaaacaaagttaagaggtgcttcatgtgttgggtcccagaccctgcttgcaaagaagactcctttatggcagatctacacacacgttgcttttggaaggtctgatgtcctaggtatgaggagtctgatggctcaactatatctaaaactgatggactttctaaaccagccccttcgttctgcaagctggtactagatggagctggaattgagctctgtgctacttttccatgttaaatatcaaagaccagaactggctgcactttgacttaagcatgaagatgggactctgagacaggacatttggaccttcttgctcgtcaggcccgggtaacatactgaggaaggctttactgggggcgtgccagcaacagtgccctacaccaccgacagctgcacttcggtaactgcatagtgtccatcacctgatttaataggcagcatcagcatgtgagaggaaaagagaaactacaaggagtagctggaatttccctgggactccgcagctgcccaggtggctctgaaagcctttgggtgtgacaccttcccagaggctgaaggtaaggcagcttctctcctctgcaattagcaagtgttaaggcaggtgtcataggagctaactccgctccggggggcccacaatactgaagccaggggcgttgcaccaagactgaccttggtccctaaacttaggtgcgccgctgaagcgtgtaacgccagagagagggatggagattgctttgcatggccccagggggtataagagctcggagtaaagggagcagatcgagcaaagggaaattaaatgcattgaactgtgggataatgccctgaggggaggggtgggacatttaaaacagggataattacccctcctgctagctaaccagcctaccagctccctctttgacacagctgaataagccactgcctctagactaaaagtttctaaattcaagtcctggggatagtaatctgcacagcatgagttgagtctcagctctggggactttacccatgtctgggacagagggcaagcgttctctccttgctactgaaacacctttgcttggctttgactgcatgccagtgcagacgggggatctttacactagcgagctgggatgcgtgggaatggatgacagagtgtcaatgcaaaggagtatctgtcactgtggctcacgggtattctctgctttgttacagtgactcactcagcctctcctctgaagaattcactccacactgcttctagcacagaagaaaagaggcttgaattccaagggggagcagatgtcagaattcaaagccaccgtgtgtctcatctggagtcctgagggaaacacccagaccaggtaattagtgcggagcctcctaaagggtctaatgccaagtgccccctgaaggatgcttggtgccagtgcatgcaccacccagaggagtttattcctgataggggtagtgggcatcacagccttgtcttctgcttatgacattcaggccaccaagcagccatcagggtctgacccaggccaccaaggggatgtctacacagaaaagaaaaacccacggctggcccgaatcagtcgaccggggctgcgggctgtgtagacatccagactggggttggagcctgagctctgggaccctcccagcctgtagagtcctagattccgggctccaccctggtggtctagccctgaaagtattccctctctccagctcctgctccatcccgtaccctccacttaatcctgcttgctgttgcttttagggattgctgctactgttgctgagactttttccgtgtggctgagagccgctgcttccactgggaagaatgggaaagctcagaaggatggaaggatggaagagccttctgccagagaaagaggtgatgagatgaaagagcggctttaaagatacagcgatgaaaagacgaagggggaactacatccgctgagcagaaaaagctccagggattgcgctggccaaagccgggccaagctgaatagagcaagctctgtatggaaggaaaggcaaaagagggcatgaaggaccaagccggtccttggactttggagacagcagaggcgctggggttgtattgctgtaaccgagcaatactccctgctgatttaggcgtaactgcacccagggttttttaggctgatgggggctggaggaaagaaatgatccttggttgcgaactaaaatcctgctctgattcaatttgctgagagtgacagatccaagcaggctgagaactctcctggttgttaatgttttaactcatttgacctgactgcgggtagtttcatttcatgcaggtagccgtggtcaaaccgcaatagctttgggggttcagaaaagcatcctggaagccagatgcttgtctgaacaatgtgagtctgcacaactgggccagtcagctcacaagaacagaccctcttgtgagataataggcacttcctgcttctggatgggccagaattactgcaagaactgggcttcttgtgctactttggtgcttttctttccggccagaaccaggaagtggaatggtgtgtgaaaaacaatcatgtgagtgaaaattgatccaacttttttgaacttcaagaaagttttggttcatgtgttgggtgaagggtcaggttggttcttatttcttccaaatccacctgtcccgtgtgtgtgtgtgtgtgtgtgtgtgtgcgcgtgtgctgagcaaccaaatcaatcccaataaccaaattctgcagtattttgttacattttgactgaaccgatgatatctgatgcatactccaacgatcagtcagcaaaaatgcccggggaccagattgtgtggatgccacaggaagatggcagctaggtagaccataggggtaaaaatcctttgttttgcagtgctcagtacaaaggctttttcagggaccctcaatatccagtggcattgtcttttggcattttcttttcctgaacatttattctcactttgctaaataaatgaagcaaaccgagccatggcaccttttggccctgggatttttgtcacctgacctttagaagtatgcagaactggatctctggtactggttttattccactggttgctcctagcagattgtagcaccccggtttatataatcagctcttcttgaaaggaccgataatacttctgtcccggggcagactggcgtgtgtgagttgatgtgtgttgtgtctgtggaacctaaacagaattctactcctgtatcattttcttaggcaattttacattttaactctgacaaagctgctgcataggtttatttttactatagatcttattaattcagattatattgtataaaaggtgactctgtggagccattacgggcctctgtattcactgtattaggttggaaaccaaaggtctttgcaaggtgaaataacttgacctaactgactgtatctgctcgtttatccctcatgtgtcatcttggagttactgactcacccaaacggtgtcagtcactagaatccgtcaatagaacaacaccccattctgtttgccattgtagcaaagtctgttcttagaaaagagccttttgtagatttatttaataaaacgctgaa

SEQ ID NO: 113 - DNA, 6161 bp, Strigops habroptila
agagcctggactagtggcagttcagccagggaagagaagcagctctttgcatctctagtgaaagcatttctcgactcaccaagtttaccagaggagaaagcaccgggatttttgcagcagcttccagcttctgtgtgcatctctctgtgtttctctccagcggggactctacagccgttcaactccggacaagcaggtagcaggcaacattcagccaactcctctctccttgttcctggaggatcctggctctccctgggacaccctgagcacgtgagaccagcgtttgcaactgggcaccgggagaaatttgcctacaactctttctgggatccccggggaccaaacagctcgctctgcggtgatatctgatttggttgtgtttgtgttgaaaagtcttttgaggggggtttagaagtctctgtgtgtctttcaggaagtgttgtggtgggggttttttgagagccagctctagtgccagggctttacaacacagttctttctgtgtttgacactcgcacggtcggagccatgcagctggataatgtcaccaacgctggcatccactccttccaggggcaccgtggagttgccaacaagcccaatgtgatcctgcagatagggaagtgcagggcagaaatgctggagcatgtcaggaggacccaccggcacctcctgactgaggtctccaagcaggtggagcgcgagctgaaaggcttgcagaagtcagtggggaagttagagagtaacttagaggaccacgtcccaactgataaccaaaggtggaagaagtccatcaaggcctgcctggccagatgtcaggaaaccattgctcatctggagaggtgggtcaagagagagatgaatgtttggaaggaggtctttttccgtctggagaagtgggcggaccgtctggagtccatgggaggcaaatattgccctggggagcatggcaagcagactgtgtccgttggggtgggaggcccagagataaggccgagtgagggtgagatttatgactatgcccttgatatgagccaaatgtatgccctgacccctccacccggggaggtgcccagcatcccccaggcccatgattcctaccagtgggtctctgtgtcggaggatgctccaacctccccagtggagactcaggtctttgaggatccccgggagttcttgagccacttggaggaatatttaaagcaggtgggtggaacagaggagtattggctgtctcagatccaaaaccacatgaacggcccagctaaaaagtggtgggaatacaagcaggactccgtcaagaactgggtcgagttcaagaaggagttcctgcagtacagcgaggggactctgactagggatgctatcaaaagggagctggatttgccacagaaagagggggaacccctggatcagttcctttggcgcaagagagacttgtaccagaccctctatgtagatgcagatgaggaggaaattatccagtatgtggtaggcaccctccagcccaaactaaagcgcttcttgagttaccccttgcccaagaccttagagcagctgatccagagagggaaggaagtccaaggcagcatggaccactctgaggagcccagcccacagaggacccctgagattcaagcaggagattctgtggagacagtgcctccctcaaccactgccagtcccgtgccgagcaatgggactcaacctgagccccctagcccaccagctactgtcatatgagctagtccatgggaggcagcggtctgggttacatgaaagggagaaaggggcgtatttaggaagcttctccttggggagaggttctggctgagacgagacatgaggtgtgctcagtccaacagcccatagcagagcaattaactttgcttgtggggggagggaggtgatggggtaccttaggatgtggttgcccacctcacctgagccatgcagtacggtggtgctggagatactgcttgcaccactgtggggaacagacaattttatgggatccctgacaagaaactaaagacaattcctaacttcagaagcagctgcttagcacgggcagcttgcaaggacttcatatgagtgcagcaattggctgagggttcctacccatctggatctttccttctccttctctcctccctctactgaagaggtgtccctgccctgaagagacatcttccttttgaaccctgtccttttctgatttaccactgggcttctgttagcttggcaatctcctgcttttattgctccaaaggattaaatattgttttaaatatatatatgtatttttagaggaattcctatgacttcaggaactgaaaactctgaggatctggatcatttttagtgggtttttttttttcatttccctgcacctaatacctgctttaatgtttttcccctcaagaggcttttactggtttatttcttgtcttagtttcggctcactccaatcaaggccactgcagtgcagaggaaaatctcatcctttctctgcacattattctgtgcattcagcaggaaacagagtttcagatttaattctgagctcatttattaaaagggaagtctatttcctttcagagaagagagggtgtcaaggtggacagaggaggcaccagagctattttaagagggtggggggaagtaaaggaaataaatccttatactttgaattaaagaaacaaacacaacctaaatccagagcaaaatattcccagagcagcaaatcaaatccatgctgatgtgtggagataacaggagcttttgccatgtaaaagcaaaaagaaatgaagagaggagctttgtgtcccagcacagtttcagcttgtgcatcacaaggaggagtttctgctcacacagacagatacaaaatgctcttgcaaagcctgacacccttgtcctggagcacttgaggacagagccttgtttgttcacaaagaactttctacagcatcttactgtggatgaagacggacttggactctctgacatttttcatgttgagacagtaatgctcagcattcaccttgctttggccagcatctgatgataggactttgaggtgacacttctgtaagacattcaggaagcctggctcttcaaagcttcttgaggctggacacatctcaagcatcatctgcattcaccaccagaccaaataaacaacacctctgtcagacaaccagcagggatgcagcaacaggaatgcccttgggatgctcctggcactactgcagcagtgacgtgtggcactgatggcttggaaggccttttggtgtgcctccttccaagaggctgaaggtaaggcaactctctgacattctgcactcctcagacctaaattagccatggcccttcagtagaaacctagcaatgggataaaacaatatctgaaatgggacatggagcattgtaacagattaggtttgcaagaaaggggaagggagagccagcaaaagggaaataaaggaaagtgagtgggaaaagtttccaaataggacagtatcttgccctttctgattaatatggggaggaaatgggaagtttcattagcccagcccaaggacttgccccatggtccatgcacagcccaaaggagacgcatgtttgctctgcacccttgctagatatgagtatgtctcaggaatagtgagggaatcttctcttgcttattcagagttagttagctgtggctgtgtttgcagagagaagggagatttctcaccaatgacctgggatgagcgatgggggagtgggtgtcattgctgagtatgagctggccgctcattacaaacatcatcttctcttggttgcagtgactcactcagatcctcctctgagaaggaatcacttcacagtgctcaggatttggaaaataagccaaagagaaaaagcttcaaaaccaaggattcaacgtcagaactgctgtcaggattcccagccaccaactgctggatccactgtctgaaggaaagaccggcacaggtaattacctcccatcttacccttgtgggtctttcttagcctccccagtgccctgacatgaaatattgaatagcccaggtcttgagacctcagccccagtggtttcaagaacctggcaccaccagctaggtgtgatttcagtttcttgatgtaggaacccaagcaccagccccaatgattaatgctctggggacagtgcacatcatgcgtttctttctgatggaccactggcaaatgcttagatgccaatgagtgggacctccagggcgcaaactcccaaggggcatagctgaatttaaccccatgtcctaagaaatcccttgtgttctccaatttagatatctaactggagctattgcactgtattttcttttacagagatccctgctgctgttgctgcatttccttctctgtgttcaagagtcctgctttcccaggggagaagcgagtgctgcaggatgacagagggcaaatcactcaccaaagagcctctcatgcagcacaatgcagttcaaggtgctgagagccagaatgaaaggcggaagccacttccagcaggacgaagaaaagtctgagctggtccaggtactccaagcaagaaagccctgagcatgaaaagagaaaccaagagggagaacagaagaaccaagtctgagctttgtggacagcaagaatgctggtcttgtgctgactgtctgttgagatgataccatacctctgcaatttggggccactgcgactcacctgatgaaatcttcactagattatcagctaaaaaaaactttcctgattaactttgccaaatgactgaccctacttaggctacgaaccctccacgctgttaatgctgtaactcatttttcctgagttgagggtagcttcatttcatgcgggtattagtttcaaacctcaaagggctctggaggttcggagaagcatcctgcagttccagatgcttgtctgaactgcttgagcctgcacaactgtcttgccagaaattatagtcttgtgagacagcaggcgcttcctggatctgcatgggccagagttactgcaagaactggggttcttgtggtggctttggcgtgaccatttccatccagacccagggagtgcaaaaaagtgtgcaaaagaaagagcttgaatgagtgaacaaggcagttttggttcgcatctcagctgaagaggtccagttggttcctctctcttccagagccaactgtcccgggtatgtgtgcgtgcgtgtcggtgcgggtgtatgtgtgttgagcaatcaaatccacctcactaaattctgtggtgttctgtcacatttgaattaagccaatgggacctgatgtgcattccaacaatgctcagcaaaaatgtccaggactggaaaatcaggtaaaaccatgtaaaggcaaacttcacaggcatcatctcaaggtcaaaatgatgtttgaggtgcttcatttccacaatcctttacaagggacttggcagcctcaataggcattttattttttccatagactttcctgcctttttaatgaattatcctgtctgtgctacttggtcatttggtcctgaggtttatacattttcagctgactttttggagtgtacagaactgaatctcctggactgattttatttcaattactgctcctggcaggtcggagctttacttgtagcaccctggtttatattaccagcctctccaggaagggctggtagtttattttcctggggcaatggcacatgaatgaagaagtgtgtatgtgttgtgtctgtgcaattttagtggatttcaaccactgagtttttctctttcttttccttaggcaattttacatttgactctgacaaaactactttagaggttttatttttactagagatattattaattcaaacaaccttgtacaaaaggcaaacgcattgaattgctacaggttataggggttgaagccaaaaggtctttgtaagccgacatcactcaccctagatctgactgtatcaggcagtttattcctcatgtgtcatgttggagttacaagatcacaccaagccactagaacctgtcaatagaatagtgctactctctatttgctattgtagcaaaaccttttgtagatttatacaataaaactttgaaatatctgcttcaa

SEQ ID NO: 114 - protein, 404 aa, Anas platyrhynchos
MQLDNVTNAGIHSFQGHRGVANKPNVILQIGKCRAEMLEHVRRTHRHLLSEVSKQVERELKGLQKSVGKLENNLEDHVPTDNQRWKKSIKACLARCQETIAHLERWVKREMNVWKEVFFRLEKWADRLESMGGKYCPGEHGKQTVSVGVGGPEIRPSEGEIYDYALDMSQMYALTPPPGEVPSIPQGHDSYQWVSVSEDAPASPVETQVFEDPREFLSHLEEYLKQVGGTEEYWLSQIQNHMNGPAKKWWEYKQDSVKNWVEFKKEFLQYSEGTLTRDAIKRELDLPQKEGEPLDQFLWRKRDLYQTLYVDADEEEIIQYVVGTLQPKLKRFLSYPLPKTLEQLIQRGKEVQGNMDHSDEPSPQRTPEIQSGDSVESMPPSTTASPVPSNGTQPEPPSPPATVI

SEQ ID NO: 115 - protein, 404 aa, Gallus gallus
MQLDNVTNAGIHSFQGHRGVANKPNVILQIGKCRAEMLEHVRRTHRHLLSEVSKQVERELKGLQKSVGKLENNLEDHVPTDNQRWKKSIKACLARCQETIAHLERWVKREMNVWKEVFFRLEKWADRLESMGGKYCPGEHGKQTVSVGVGGPEIRPSEGEIYDYALDMSQMYALTPAPGEVPSIPQAHDSYQWVSVSEDAPASPVETQIFEDPHEFLSHLEEYLKQVGGTEEYWLSQIQNHMNGPAKKWWEYKQDSVKNWVEFKKEFLQYSEGTLTRDAIKRELDLPQKEGEPLDQFLWRKRDLYQTLYVDADEEEIIQYVVGTLQPKLKRFLSYPLPKTLEQLIQRGKEVQGNMDHSEEPSPQRTPEIQSGDSVESMPPSTTASPVPSNGTQPEPPSPPATVI

SEQ ID NO: 116 - protein, 383 aa, Xenopus tropicalis
MAITMAASGMLVPTLSNPEQTVALQIGTCSPAEMLDRVRKTQVYILSGVSRQVESELKGFKRSVMRLNANMTDEAPAVGIRRWKRSIKACLMRCQDTLVNLERWVKREMNSWRDVFSRFEKMVSKTDQAVYRASKIDEKPRRFFQGFGFLGDKKKEAELSQDIVDPYAPSPKKECEPHEWVVISVDILSPPEFDANMSEDPREFIVNLEKYFKRSGWDEKVWLSQVDNHLKGAAKKWWEYRKETIDSWHDFKVAFLQYCERLLVREAIKRDLDLPQRRWEPFEQFVWKKRALYHRLYVDANEEEMIRYIISTLHPEIRRFLKPPFPKTVEDLVQMGKEIQFEFEQSEKQTLKAAYSDEQISTKLKVTVTKDPYDSNSVCTEKM

SEQ ID NO: 117 - protein, 404 aa, Taeniopygia guttata
MQLDNVTSAGVHSFQGHRGVANKPNVILQIGKCRAEMLEHVRRTHRHLLTEVSKQVERELKGLQKSVGKLENNLEDHVPTENQRWKKSIKACLIRCQETIAHLERWVKREMNVWKEVFFRLEKWADRLESMGGKYCPGEQGKQTVSVGVGGPEIRPSEGEIYDYALDMSQMYALTPPPGEVPSIPQGHDSYQWVSVSEDAPASPVETQVFEDPREFLSHLEEYLKQVGGTEEYWLSQIQNHMNGPAKKWWEYKQDSVKNWVEFKKEFLQYSEGTLTRDAIKRELDLPQKEGEPLDQFLWRKRDLYQTLYVDADEEEIIQYVVGTLQPKLKRFLSYPLPKTLEQLIQRGKEAQGNMEHSEEPSPQRTPEVQPGDSVETVPPSTTASPVPSNGTQPEPPSPPATVI

SEQ ID NO: 118 - protein, 396 aa, Macaca mulatta
MELDHRTSGGLHAYPGPRGGPAAKPNVILQIGKCRAEMLEHVRRTHRHLLTEVSKQVERELKGLHRSVGKLESNLDGYVPTSDSQRWKKSIKACLCRCQETIANLERWVKREMHVWREVFYRLERWADRLESTGGKYPVGSEPARHTVSVGVGGPESYCHEADGYDYTVSPYAITPPPAAGELPGQEPAEAQQYQPWVPGEDGQPSPGVDTQIFEDPREFLSHLEEYLRQVGGSEEYWLSQIQNHMNGPAKKWWEFKQGSVKNWVEFKREFLQYSEGALSREAVQRELDLPQKQGEPLDQFLWRKRDLYQTLYVDADEEEIIQYVVGTLQPKLKRFLRHPLPKTLEQLIQRGMEVQDDLEQAAEPAVPHVPAEDEAETLTPAPNSESVASDRTQPE

SEQ ID NO: 119 - protein, 396 aa, Bos taurus
MELDHRTTGGLHAYPGPRSGPAAKPNVILQIGKCRAEMLEHVRRTHRHLLAEVSKQVERELKGLHRSVGKLESNLDGYVPTSDSQRWKKSIKACLSRCQETIANLERWVKREMHVWREVFYRLERWADRLESGGGKYPVGSDPARHTVSVGVGGPEGYCQEADNYDYTVSPYAITSPPAAGQLPGQEEVEAQQYPPWGPGEDGQLSPGVDTQVFEDPREFLSHLEDYLRQVGGSEEYWLSQIQNHMNGPAKKWWEFKQGSVKNWVEFKKEFLQYSEGTLSREAIQRELDLPQKQGEPLDQFLWRKRDLYQTLYVDAEEEEIIQYVVGTLQPKLKRFLRPPLPKTLEQLIQKGMEVQDGLEPAAEPTGPHPPAEEEAESLTPALTNESVASDRTQPE

SEQ ID NO: 120 - protein, 396 aa, Pan troglodytes
MELDHRTSGGLHAYPGPRGGQVAKPNVILQIGKCRAEMLEHVRRTHRHLLAEVSKQVERELKGLHRSVGKLESNLDGYVPTSDSQRWKKSIKACLCRCQETIANLERWVKREMHVWREVFYRLERWADRLESTGGKYPVGSESARHTVSVGVGGPESYCHEADGYDYTVSPYAITPPPAAGELPGQEPAEAQQYQPWVPGEDGQPSPGVDTQIFEDPREFLSHLEEYLRQVGGSEEYWLSQIQNHMNGPAKKWWEFKQGSVKNWVEFKKEFLQYSEGTLSREAIQRELDLPQKQGEPLDQFLWRKRDLYQTLYVDADEEEIIQYVVGTLQPKLKRFLRHPLPKTLEQLIQRGMEVQDDLEQAAEPAGPHLPAEDEAETLTPAPNSESVASDPTQPE

SEQ ID NO: 121 - protein, 398 aa, Callithrix jacchus
MELDHRTSGGLHAYPGPRGGPAAKPNVILQIGKCRAEMLEHVRRTHRHLLTEVSKQVERELKGLHRSVGKLESNLDGYVPTGDSQRWKKSIKACLCRCQETIANLERWVKREMHVWREVFYRLERWADRLESMGGKYPVGSEPARHTVSVGVGGPESYCQEADGYDYTVSPYAITPPPATGELPGQEPAEAQQYQAWIPGEDGQPSPGVDTQIFEDPREFLSHLEEYLRQVGGSEEYWLSQIQNHMNGPAKKWWEFKQGSVKNWVEFKKEFLQYSEGTLSREAIQRELDLPQKQGEPLDQFLWRKRDLYQTLYVDADEEEIIQYVVGTLQPKLKRFLRHPLPKTLEQLIQRGMEVQDDLEQAAEPAGPGPHVPAEDETETLTPAPNSESVASDRTQPE

SEQ ID NO: 122 - protein, 404 aa, Columba livia
MQLDNVTNAGIHSYQGHRGVANKPNVILQIGKCRAEMLEHVRRTHRHLLSEVSKQVERELKGLQKSVGKLENNLEDHVPTDNQRWKKSIKACLARCQETIAHLERWVKREMNVWKEVFFRLEKWADRLESMGGKYCPGDHGKQTVSVGVGGPELRPSEGEIYDYALDMSQMYALTPPPGEVPSIPQAHDSYQWVSVSEDAPVSPVETQVFEDPREFLSHLEEYLKQVGGTEEYWLSQIQNHMNGPAKKWWEYKQDSVKNWVEFKKEFLQYSEGTLTRDAIKRELDLPQKEGEPLDQFLWRKRDLYQTLYVDADEEEIIQYVVGTLQPKLKRFLSYPLPKTLEQLIQRGKEVQGNMDHSEEPSPQRTPEIPSGDSVESVPPSTTVSPVPSNGTQPEPPSPPATVI

SEQ ID NO: 123 - protein, 405 aa, Chelonia mydas
MQLDSITNGSVHTFQGHRGVANKPNVILQIGKCRTEMLEHVRRTHRHLLTEVSKQVERELKGLQKSVGKLENNLEDHVPSTDNQRWKKSIKACLARCQETIAHLERWVKREMNVWREVFFRLEKWADRLEAMGGKYGPADHARQTVSVGVGGPEGRSNDGEIYDYALDMSQMYALTPSPGEITSMPQPHDSYQWITAPEDAPASPVETQIFEDPREFLSHLEEYLKQVGGTEEYWLSQIQNHMNGPAKKWWEYKQDSVKNWVEFKKEFLQYSEGTLTRDAIKRELDLPQKQGEPLDEFLWRKRDLYQTLYTDAEEEEIIQYVVGTLRPKFKRFLSHPLPKTLEQLIQRGKEVLSDFDQSEEPTPQRTPEHQPGDSVDSLTPSTTASPIASDETQPEPPSPPATVI

SEQ ID NO: 124 - protein, 396 aa, Mesocricetus auratus
MELDHMTTGGLHAYPAQRGGPAAKPNVILQIGKCRAEMLEHVRRTHRHLLTEVSKQVERELKGLHRSVGKLENNLDGYVPTGDSQRWKKSIKACLCRCQETIANLERWVKREMHVWREVFYRLERWADRLESMGGKYPVGSEPARHTVSVGVGGPEPYCQEADGYDYTVSPYAITPPPAAGELPDQESVEAQQYQSWGSGEDGQPRPDVDTQIFEDPREFLSHLEEYLRQVGGSEEYWLSQIQNHMNGPAKKWWEFKQGSVKNWVEFKKEFLQYSEGTLSREAIQRELDLPQKQGEPLDQFLWRKRDLYQTLYVDAEEEEIIQYVVGTLQPKLKRFLRHPLPKTLEQLIQRGMEVQDGLEQAAEPSGTPLPTEDETEALTPALTSESVASDRTQPE

SEQ ID NO: 125 - protein, 398 aa, Equus caballus
MELDHMTSGGLHAYPGPRGGPVAKPNVILQIGKCRTEMLEHVRRTHRHLLAEVSKQVERELKGLHRSVGKLESNLDGYVPTGDSQRWKKSIKACLCRCQETIANLERWVKREMHVWREIFYRLERWADRLEAMGSKYQVGSEPARQTVSVGVGGPENYCQDADAYDYTVSPYAITSPPAAGELPGQEPVEAQQYPPWGPGEDGQLSPGVDTQIFEDPREFLSHLEEYLRQVGGSEEYWLSQIQNHMNGPAKKWWEFKQGSVKNWVEFKKEFLQYSEGTLSREAIQRELDLPQKQGEPLDQFLWRKRDLYQTLYVDADEEEIIQYVVGTLQPKLKRFLRHPLPKTLEQLIQRGMEVQDGLEQAAEPAGPRLPTEDEGEAESVTPALTNESVASDRTQPE

SEQ ID NO: 126 - protein, 396 aa, Marmota monax
MELDHMTSGGLHAYPGPRGGPAAKPNVILQIGKCRAEMLEHVRRTHRHLLTEVSKQVERELKGLHRSVGKLENNLDGYVPTSDSQRWKKSIKACLCRCQETIANLERWVKREMHVWREVFYRLEKWADRLESMGGKYPVGNDPARHTVSVGVGGPESYCHETDGYDYTVSPYAITPPPAAGELPGQEPAEAQQYQPWGPGEDGQPSPGVDTQIFEDPREFLSHLEEYLRQVGGSEEYWLSQIQNHMNGPAKKWWEFKQGSVKNWVEFKKEFLQYSEGTLSREAIQRELDLPQKQGEPLDQFLWRKRDLYQTLYVDAEEEEIIQYVVGTLQPKLKRFLRHPLPKTLEQLIQRGMEVQDGLEQGVEPAGPQVPTEDEAEALTPALTSESVASDRTQPE

SEQ ID NO: 127 - protein, 529 aa, Meles meles
MSRGGGVRARRRISHPGRWRVRGAGPPGAPGARAGAGGGARGAGSPAGTNGSGGSARGRPRPCGRIKGRRRRQGAELGAAAPRSSPPPRALPRSAAAAAAAAAAAAPGPKGPSRLHRTPASETPQPAAATCAPMELDHRTSGGLHAYPGPRGGPAAKPNVILQIGKCRAEMLEHVRRTHRHLLTEVSKQVERELKGLHRSVGKLESNLDGYVPTGDSQRWRKSIKACLCRCQETIANLERWVKREMHVWREVFYRLEKWADRLESMGGKYPVGNEPARHSVSVGVGGPEGYCQEADGYDYTVSPYAITPPPAAGELPGQEPGEAQQYPPWGTSEDGQPSPGVDTQIFEDPREFLSHLEEYLRQVGGSEEYWLSQIQNHMNGPAKKWWEFKQGSVKNWVEFKKEFLQYSEGTLSREAIQRELDLPQKQGEPLDQFLWRKRDLYQTLYVDAEEEEIIQYVVGTLQPKLKRFLRHPLPKTLEQLIQRGREVQDGLEQAAEPAGTPVPTEDEPDALTPALTSESVASDRTQPE

SEQ ID NO: 128 - protein, 400 aa, Mirounga angustirostris
MELDHMTSGGLHAYPGPRGGPVAKPNVILQIGKCRAEMLEHVRRTHRHLLTEVSKQVERELKGLHRSVGKLESNLDGYVPTGDSQRWKKSIKACLCRCQETIANLERWVKREMHVWREVFYRLEKWADRLESMGGKYPVGNDPARHTVSVGVGGPEGYCQEADAYDYTVSPYAITPPPATGELPGQEPVDAQQYPPWGPGEDGQPSPGVDTQIFEDPREFLSHLEEYLRQVGGSEEYWLSQIQNHMNGPAKKWWEFKQGSVKNWVEFKKEFLQYSEGTLSREAIQRELDLPQKQGEPLDQFLWRKRDLYQTLYVDAEEEEIIQYVVGTLQPKFKRFLRHPLPKTLEQLIQRGMEVQDGLEQAAEPVGPRLPTEDEAEAEAEALTPALTNESVTSDRTQPE

SEQ ID NO: 129 - protein, 405 aa, Phyllostomus hastatus
MELDHRTSGGLHAYPAPRGGQVAKPNVILQIGKCRTEMLEHVRRTHRHLLAEVSKQVERELKGLHRSVGKLESNLDGYVPTSDSQRWKKSIKACLCRCQETIAHLERWVKREMHVWREIFYRLERWADRLEAMGSKYQVGGDAARHTVSVGVGGPEGCSQEADGYDFPVSPYAITPPPAAGELPGQELEEAQQYPPWGPGEDGQPSPGVDTQIFEDPHEFLTHLEEYLRQVGGSEEYWLSQIQNHMNGPAKKWWEFKQGSVRNWVQFKKEFLQYSEGTLSREALQRELDLPQKQGEPLDQFLWRKRDLYQTLYVDADEEEIIQYVVGTLQPKLKRFLRHPLPKTLEQLIQRGLEVEGGLEPGSETASPQPPAGDEAEAEPENESNEALTPALTNESAASDRTQPE

SEQ ID NO: 130 - protein, 372 aa, Lemur catta
MELDHMKSGGLHAYPGLRGGQVAKPNVILQIGKCRAEMLEHVRRTHRHLLTEVSKQVERELKGLHRSVGKLENNLDGYVPTSDSQRWKKSIKACLCRCQETIANLERWVKREMHVWREVFYRLERWADRLESMGGKYPVGSEPARHTVSVGVGGPESYCQEADGYDYSVSPYAITPPPAAGELPGQEPAEAQQYQPWGPGEDGQPSPGVDTQIFEDPREFLSHLEEYLRQVGGSEEYWLSQIQNHMNGPAKKWWEFKQGSVKNWVEFKKEFLQYSEGTLSREAIQRELDLPQKQGEPLDQFLWRKRDLYQTLYVDADEEEIIQYVVGTLQPKLKRFLRHPLPKTLEQLIQRGMEVQGGLEQAAGAGWPSRPH

SEQ ID NO: 131 - protein, 396 aa, Leopardus geoffroyi
MELDHMTSGGLHAYPGPRGGPAAKPNVILQIGKCRAEMLEHVRRTHRHLLTEVSKQVERELKGLHRSVGKLESNLDGYVPTGDSQRWKKSIKACLCRCQETIANLERWVKREMHVWREVFYRLERWADRLESMGGKYPVGGEPARHTVSVGVGGPESYCHDADGYDYTVSPYAITPPPAAGELPGQEPAEAQQYPPWAPGEDGQPGPGVDTQIFEDPREFLSHLEEYLRQVGGSEEYWLSQIQNHMNGPAKKWWEFKQGSVKNWVEFKKEFLQYSEGTLSREAIQRELDLPQKQGEPLDQFLWRKRDLYQTLYVDAEEEEIIQYVVGTLQPKLKRFLRHPLPKTLEQLIQRGKEVQDGLEQASEPAGPQLPAEEEAEALTPALTSESVASDRTQPE

SEQ ID NO: 132 - protein, 405 aa, Mauremys mutica
MQLDSITNGSVHTFQGHRGVANKPNVILQIGKCRAEMLEHVRRTHRHLLTEVSKQVERELKGLQKSVGKLENNLEDHVPSTDNQRWKKSIKACLARCQETIAHLERWVKREMNVWREVFFRLEKWADRLESMGGKYGPTDHARQTVSVGVGGPESRGNEGEIYDYALDMSQMYALTPSPGEITSMPQPHDSYQWITAPEDVPASPVETQIFEDPREFLSHLEEYLKQVGGTEEYWLSQIQNHMNGPAKKWWEYKQDSVKNWVEFKKEFLQYSEGTLTRDAIKRELDLPQKQGEPLDEFLWRKRDLYQTLYTDAEEEEIIQYVVGTLRPKFKRFLSHPLPKTLEQLIQRGKEVLSDFDQSEEPTPQRTPEHQPGDSVDSLPPSTTASPIASDETQPEPPTPPATVI

SEQ ID NO: 133 - protein, 398 aa, Equus asinus; identical to SEQ ID NO: 125

SEQ ID NO: 134 - protein, 400 aa, Gracilinanus agilis
MELEHLSSGGLHTYHGPRGGPAAKPNVILQIGKCRAEMLEHVRKTHRHLLTEVSKQVERELKGLHRSVGKLENNLDGYVPTGDSQRWKKSIKACLSRCQETIAHLERWVKREMNVWREVFYRLEKWADRLESMGGKYPVSGEPTRQTVSVGVGGPESYCQETDPYDYTVSPYAITPPTPAGVTAGGEAISHEPSDIQQYPPWSSTTEDGTLSPGVDTQIFEDPREFLSHLEEYLKQVGGTEEYWLSQIQNHMNGPAKKWWEYKQGSVKNWVEFKKEFLQYSEGTLTRDAIKRELDLPQKQGEPLDQFLWRKRDLYQTLYVDADEEEIIQYVVGTLQPKLKHFLRHPLPKTLEQLIQRGQEVQEGLEQGEDPIEQQTQSEDNDESLTPAIESLASDGTQPE

SEQ ID NO: 135 - protein, 403 aa, Varanus komodoensis
MQLDNINHGSIHSFQGHRGMANNKPNVILQIGKCRAEMLDHVRRTHRHLLTEVSKQVERELKGLQKSVGKLENNLEDHVPSAAENQRWKKSIKACLSRCQETIAHLERWVKREMNVWKEVFFRLEKWADRLESGGGKYSHGECARQTASVGVGGPEIRPSEGEIYDYALDMSQMYALTPPPLGDMPHDSYQWITVPEDAPPSPVETQIFEDPREFLTHLEDYLKQVGGTEEYWLSQIQNHMNGPAKKWWEYKQDSVKNWLEFKKEFLQYSEGTLTRDAIKQELDLPQKDGEPLDQFLWRKRDLYQTLYVDADEEEVIQYVVGTLQPKLKRFLSHPYPKTLEQLIQRGKEVEGNLDHSEEPSPQRTPEHQLGDSVESLPPSTTASPVASDGTQPEISAPPATVI

SEQ ID NO: 136 - protein, 399 aa, Bufo gargarizans
MAASMALSGIGAPALSVPEKTVALQIGTCSPAEMLDRVRKTQVYILSGVSRQVENELKGFKRSVQRLNSNMHYESSVVGIQRWKRSIKACLMRCQGTLVNLERWMKREMNSWRGVFSRFEKMVSKADQNLCRTCKMEEKHRWSFYGEKSEKEKEADANQEIVDPYAPSPPSSPPPPPPPLPAQSCHPHHWVVISVDILSPPEFDAGMSEDPREFIVNLEKFFKRSGWNEKVWLSQVDNHLKGAAKKWWEYRQETVESWHDFKVAFLQYCERIVVREAIKRDLDLPQRRWEPLEQFVWKKRALYHRLYVDANEEDMIRYIISTLHPEIKRFLKSPLPKTMDQLVQMGKEIQFDFEQSEKQTLKAAYSDEQISTKLNVIVTKDPYDSNSIVTEKSSYIEGY

SEQ ID NO: 137 - protein, 396 aa, Neogale vison
MELDHRTSGGLHAYPGPRGGPAAKPNVILQIGKCRAEMLEHVRRTHRHLLTEVSKQVERELKGLHRSVGKLESNLDGYVPTGDSQRWRKSIKACLCRCQETIANLERWVKREMHVWREVFYRLEKWADRLESMGGKYPVGNEPARHTVSVGVGGPEGYCQEADGYDYPVSPYAITPPPAAGELPGQEPGEAQQYPPWGSSEDGQPSPGVDTQIFEDPREFLSHLEEYLRQVGGSEEYWLSQIQNHMNGPAKKWWEFKQGSVKNWVEFKKEFLQYSEGTLSREAIQRELDLPQKQGEPLDQFLWRKRDLYQTLYVDAEEEEIIQYVVGTLQPKLKRFLRHPLPKTLEQLIQRGREVQDGLEQGAEPASTPVPTEDEPDALTPALTSESVASDRTQPE

SEQ ID NO: 138 - protein, 400 aa, Dromiciops gliroides
MELEHMSSGGLHTYHGPRGGPAAKPNVILQIGKCRAEMLEHVRKTHRHLLTEVSKQVERELKGLHRSVGKLENNLDGYVPTGDSQRWKKSIKACLSRCQETIAHLERWVKREMNVWREVFYRLEKWADRLESMGGKYPVSGEAARQTVSVGVGGPESYCQETDPYDYTVSPYAITPPTPAGVIGGGEALSHEPSENQQYPPWSSTTEDGTLSPGVDTQIFEDPREFLSHLEEYLKQVGGTEEYWLSQIQNHMNGPAKKWWEYKQGSVKNWVEFKKEFLQYSEGTLTRDAIKRELDLPQKQGEPLDQFLWRKRDLYQTLYVDADEEEIIQYVVGTLQPKLKHFLRHPLPKTLEQLIQRGQEVQEGLEQGEDATEQQTQSEDNDESLTPAIESLASDGTQPE

SEQ ID NO: 139 - protein, 390 aa, Cervus elaphus
MELDHRTTGGLHAYPAPRGGPAAKPNVILQIGKCRAEMLEHVRRTHRHLLTEVSKQVERELKGLHRSVGKLESNLDGYVPTGDSQRWKKSIKACLSRCQETIANLERWVKREMHVWREVFYRLERWADRLESAGGKYPVGSDPARHTVSVGVGGPESYCQEADNYDYTVSPYAITPPPAAGQLPGQEEVEAQQYPPWAPGEDGQLSPGVDTQVFEDPREFLRHLEDYLRQVGGSEEYWLSQIQNHMNGPAKKWWEYKQGSVKNWVEFKKEFLQYSEGTLSREAIQRELDLPQKQGEPLDQFLWRKRDLYQTLYVDAEEEEIIQYVVGTLQPKLKRFLRPPLPKTLEQLIQKGMEVQDGLEQAAEPAAEEAEALTPALTNESVASDRTQPE

SEQ ID NO: 140 - protein, 396 aa, Prionailurus bengalensis
MELDHMTSGGLHAYPGPRGGPAAKPNVILQIGKCRAEMLEHVRRTHRHLLTEVSKQVERELKGLHRSVGKLESNLDGYVPTGDSQRWKKSIKACLCRCQETIANLERWVKREMHVWREVFYRLERWADRLESMGGKYPVGGEPARHTVSVGVGGPESYCHDADGYDYTVSPYAITPPPAAGELPGQEPAEAQQYPPWAPGEDGQPGPGVDTQIFEDPREFLSHLEEYLRQVGGSEEYWLSQIQNHMNGPAKKWWEFKQGSVKNWVEFKKEFLQYSEGTLSREAIQRELDLPQKQGEPLDQFLWRKRDLYQTLYVDAEEEEIIQYVVGTLQPKLKRFLRHPLPKTLEQLIQRGKEVQDGLDQASEPAGPQLPAEEEAEALTPALTSESVASDRTQPE

SEQ ID NO: 141 - protein, 390 aa, Cervus canadensis; identical to SEQ ID NO: 139

SEQ ID NO: 142 - protein, 396 aa, Panthera tigris
MELDHMTSGGLHAYPGPRGGPAAKPNVILQIGKCRAEMLEHVRRTHRHLLTEVSKQVERELKGLHRSVGKLESNLDGYVPTGDSQRWKKSIKACLCRCQETIANLERWVKREMHVWREVFYRLERWADRLESMGGKYPVGGEPARRTVSVGVGGPETYCHDADGYDYTVSPYAITPPPAAGELPGQEPAEAQQYPPWAPGEDGQPGPGVDTQIFEDPREFLSHLEEYLRQVGGSEEYWLSQIQNHMNGPAKKWWEFKQGSVKNWVEFKKEFLQYSEGTLSREAIQRELDLPQKQGEPLDQFLWRKRDLYQTLYVDADEEEIIQYVVGTLQPKLKRFLRHPLPKTLEQLIQRGKEVQDGLEQASEPAGPQRPAEEEAEALTPALTSESVASDRTQPE

SEQ ID NO: 143 - protein, 396 aa, Panthera leo; identical to SEQ ID NO: 142

SEQ ID NO: 144 - protein, 404 aa, Lagopus leucura
MQLDNVTNAGIHSFQGHRGVANKPNVILQIGKCRAEMLEHVRRTHRHLLSEVSKQVERELKGLQKSVGKLENNLEDHVPTDNQRWKKSIKACLARCQETIAHLERWVKREMNVWKEVFFRLEKWADRLESMGGKYCPGEHGKQTMSVGVGGPEIRPSEGEIYDYALDMSQMYALTPAPGEVPSIPQGHDSYQWVSVSEDAPASPVETQIFEDPHEFLSHLEEYLKQVGGTEEYWLSQIQNHMNGPAKKWWEYKQDSVKNWVEFKKEFLQYSEGTLTRDAIKRELDLPQKEGEPLDQFLWRKRDLYQTLYVDADEEEIIQYVVGTLQPKLKRFLSYPLPKTLEQLIQRGKEVQGSMDHSEEPSPQRTPEIQSGDSVESMPPSTTASPVPSNGTQPEPPSPPATVI

SEQ ID NO: 145 - protein, 404 aa, Centrocercus urophasianus; identical to SEQ ID NO: 144

SEQ ID NO: 146 - protein, 403 aa, Dipodomys spectabilis
MQTQATKTAKELLSCKAPACPSLVCLPVPSPPWPVVPSSSHSGHCRRPPASSFCSKAPALWSGQQEPMGSPAHGYPRAEAPENQCPGNFGFWGHRLLLADTVEPAATLVSSRGQAGQLQAAWRPWQGRAETTAPAASAVDLMSRCLLALSIVIHGSLETKSARMTQPQRQRVPEGLAEARNCTFGARRMTPGLKASEESLLLCLALSPLLSLSSLHTSWSSRESVAAEKQWPGRGQHPAQPESWQWTGQREGPGFCHAGPAGHQMLAPRATTAERGSLPGRPAPSPGSLCGPHFLPEPSSSPEAAAPSPPSQPSPAGPQVSPAGLFQASCPALLLPRLGSIQALSIPSTSPGGWKPLMPAAQQALPTGTLESGDLFCRHPYRRSPVPLPAPQIYFCRSHTPLH

SEQ ID NO: 147 - protein, 396 aa, Dipodomys spectabilis
MELDRMTTGGLHAYPGPRGGPAAKPNVILQIGKCRAEMLEHVRRTHRHLLAEVSKQVERELKGLHRSVGKLESNLDGYVPTSDSQRWKKSIKACLCRCQETIANLERWVKREMHVWREVFYRLERWADRLESMGGKYPVGSEPVRHTVSVGVGGPEGYCQEADGYDYTVSPYAITPPPATGELPGQEPAEAQPYQPWGPGEDGQPSPGVDTQIFEDPREFLSHLEEYLRQVGGSEEYWLSQIQNHMNGPAKKWWEFKQGSVKNWVEFKKEFLQYSEGTLSREAIQRELDLPQKQGEPLDQFLWRKRDLYQTLYVDADEEEIIQYVVGTLQPKLKRFLRHPLPKTLEQLIQRGMEVQDGLEQASEPAGPPLPAEDEAETITPALTSESMASDRTQTE

SEQ ID NO: 148 - protein, 409 aa, Sceloporus undulatus
MQLENFNHGNIHSFQGHRGVVNNNKPNVILQIGKCRAEMLEHVRRTHRHLLTEVSKQVERELKGLQKSVGKLENNLEDHVPSAAENQRWKKSIKACLSRCQETIAHLERWVKREMNVWKEVFFRLEKWADRLESGGGKYCHGDTSRQTVSVGVGGPEIRPSEGEIYDYALDMSQMYALTPPPSGDIPVVPQPHESYQWITAPDDTPPSPVETQIFEDPREFLTHLEDYLKQVGGTEEYWLSQIQNHMNGPAKKWWEYKQDSVKNWLEFKKEFLQYSEGTLTRDAIKRELDLPQKEGEPLDQFLWRKRDLYQTLYVEAEEEEVIQYVVGTLQPKLKRFLSHPYPKTLEQLIQRGKEVEGNMDNSEDPSPQRTPEHQLGDSVEILPPSTTASPAASDRTQPEISVPPTTVI

SEQ ID NO: 149 - protein, 404 aa, Corvus kubaryi
MQLDNVTSAGVHSFQGHRGVANKPNVILQIGKCRAEMLEHVRRTHRHLLTEVSKQVERELKGLQKSVGKLENNLEDHVPTENQRWKKSIKACLARCQETIAHLERWVKREMNVWKEVFFRLEKWADRLESMGGKYCPGEQGKQTVSVGVGGPEIRPGEGEIYDYALDMSQMYALTPPPGEVPSIPQGHDSYQWVSVSEDAPASPVETQVFEDPREFLSHLEEYLKQVGGTEEYWLSQIQNHMNGPAKKWWEYKQDSVKNWVEFKKEFLQYSEGTLTRDAIKRELDLPQKEGEPLDQFLWRKRDLYQTLYVDADEEEIIQYVVGTLQPKLKRFLSYPLPKTLEQLIQRGKEVQGNMEHSEEPSPQRTPEVQPGDSMETVPPSTTASPVPSNGTQPEPPSPPATVI

SEQ ID NO: 150 - protein, 396 aa, Vulpes lagopus
MELDHMTSGGLHAYPGPRGGPAAKPNVILQIGKCRAEMLEHVRRTHRHLLTEVSKQVERELKGLHRSVGKLESNLDGYVPSGDSQRWRKSIKACLCRCQETIANLERWVKREMHVWREVFYRLERWADRLESMGGKYPVGNEPARHTVSVGVGGPEGYCQEADGYDYTVSPYAITPPPAAGELPGQEPAEAQQYPPWGPGEDGQPSPGVDTQIFEDPREFLSHLEEYLRQVGGSEEYWLSQIQNHMNGPAKKWWEFKQGSVKNWVEFKKEFLQYSEGTLSREAIQRELDLPQKQGEPLDQFLWRKRDLYQTLYVDAEEEEIIQYVVGTLQPKLKRFLRHPLPKTLEQLIQRGMEVQDGLEQAAEPAGPRLPAEDEAEALTPALTSESVASDRTQPE

SEQ ID NO: 151 - protein, 396 aa, Microtus oregoni
MELDHRTTGGLHAYPAQRGGPAAKPNVILQIGKCRAEMLEHVRRTHRHLLTEVSKQVERELKGLHRSVGKLENNLDGYVPTGDSQRWKKSIKACLCRCQETIANLERWVKREMHVWREVFYRLERWADRLESMGGKYPVGSEPTRHTVSVGVGGPEPYCQEADGYDYTVSPYAITPPPAAGELPDQESVEAQQYQSWGSGEDGQPSPGVDTQIFEDPREFLSHLEEYLRQVGGSEEYWLSQIQNHMNGPAKKWWEFKQGSVKNWVEFKKEFLQYSEGTLSREAIQRELDLPQKQGEPLDQFLWRKRDLYQTLYVDAEEEEIIQYVVGTLQPKLKRFLRHPLPKTLEQLIQRGMEVQDGLEQAAEPSGTPLPTEDETEALTPALTSESVASDRTQPE

SEQ ID NO: 152 - protein, 404 aa, Pyrgilauda ruficollis
MQLDNVTSAGVHSFQGHRGVANKPNVILQIGKCRAEMLEHVRRTHRHLLTEVSKQVERELKGLQKSVGKLENNLEDHVPTENQRWKKSIKACLARCQETIAHLERWVKREMNVWKEVFFRLEKWADRLESMGGKYCPGEQGKQTVSVGVGGPEIRPSEGEIYDYALDMSQMYALTPPPGEVPSIPQGHDSYQWVSVSEDAPASPVETQVFEDPREFLSHLEEYLKQVGGTEEYWLSQIQNHMNGPAKKWWEYKQDSVKNWVEFKKEFLQYSEGTLTRDAIKRELDLPQKEGEPLDQFLWRKRDLYQTLYVDADEEEIIQYVVGTLQPKLKRFLSYPLPKTLEQLIQRGKEVQGNMEHSEEPSPQRTPEVQPGDSVETVPPSTTASPVPSNGTQPEPPSPPATVI

SEQ ID NO: 153 - protein, 404 aa, Onychostruthus taczanowskii; identical to SEQ ID NO: 152

SEQ ID NO: 154 - protein, 392 aa, Ochotona curzoniae
MELDHMTTSGGLHAYPGPRGAPAAKPNVILQIGKCRAEMLEHVRRTHRHLLTEVSRQVERELKGLHRSVGKLENNLEGYAPTGDSQRWKKSIKACLSRCQETIANLERWVKRELHVWREVFYRLERWADRLEAMGGKYPVGSGEQARHTASVGVGGPEGCCQDVDGYDYSVSPYAITPPPAGELPGQEPGEAQQYQPWVTGEDGQPSPGVDTQIFEDPREFLSHLEEYLRQVGGSEEYWLSQIQNHMNGPAKKWWEFKQGSVKNWVEFKKEFLQYSEGTLSREAIQRELDLPQKQGEPLDQFLWRKRDLYQTLYVDADEEEIIQYVVGTLQPKLKRFLRHPLPKTLEQLIQRGLEVQDGLEQGAQPAAEEETEALTPALTSESVASDRTQPE

SEQ ID NO: 155 - protein, 404 aa, Falco naumanni
MQLDNVTSAGIHSFQGHRGVANKPNVILQIGKCRAEMLEHVRRTHRHLLSEVSKQVERELKGLQKSVGKLENNLEDHVPTDNQRWKKSIKACLARCQETIAHLERWVKREMNVWKEVFFRLEKWADRLESMGGKYCPGDHGKQTVSVGVGGPEIRPGEGEIYDYALDMSQMYALTPPPGEVPSIPQAHDSYQWVSVSEDAPASPVETQVFEDPREFLSHLEEYLKQVGGTEEYWLSQIQNHMNGPAKKWWEYKQDSVKNWVEFKKEFLQYSEGTLTRDAIKRELDLPQKEGEPLDQFLWRKRDLYQTLYVDADEEEIIQYVVGTLQPKLKRFLSYPLPKTLEQLIQRGKEVQGNMDHSEEPSPQRTPEIQSGDSVDSVPPSTTASPVPSNGTQPEPPSPPATVI

SEQ ID NO: 156 - protein, 404 aa, Cygnus olor
MQLDNVTNAGIHSFQGHRGVANKPNVILQIGKCRAEMLEHVRRTHRHLLSEVSKQVERELKGLQKSVGKLENNLEDHVPTDNQRWKKSIKACLARCQETIAHLERWVKREMNVWKEVFFRLEKWADRLESMGGKYCPGEHGKQTVSVGVGGPEIRPSEGEIYDYALDMSQMYALTPPPGEVPSIPQAHDSYQWVSVSEDAPASPVETQVFEDPREFLSHLEEYLKQVGGTEEYWLSQIQNHMNGPAKKWWEYKQDSVKNWVEFKKEFLQYSEGTLTRDAIKRELDLPQKEGEPLDQFLWRKRDLYQTLYVDADEEEIIQYVVGTLQPKLKRFLSYPLPKTLEQLIQRGKEVQGNMDHSDEPSPQRTPEIQSGDSVESMPPSTTASPVPSNGTQPEPPSPPATVI

SEQ ID NO: 157 - protein, 396 aa, Puma yagouaroundi
MELDHMKSGGLHAYPGPRGGPAAKPNVILQIGKCRAEMLEHVRRTHRHLLTEVSKQVERELKGLHRSVGKLESNLDGYVPTGDSQRWKKSIKACLCRCQETIANLERWVKREMHVWREVFYRLERWADRLESMGGKYPVGGEPARHTVSVGVGGPEGYCHDADGYDYTVSPYAITPPPAAGELPGQEPAEAQQYPPWAPGEDGQPGPGVDTQIFEDPREFLSHLEEYLRQVGGSEEYWLSQIQNHMNGPAKKWWEFKQGSVKNWVEFKKEFLQYSEGTLSREAIQRELDLPQKQGEPLDQFLWRKRDLYQTLYVDAEEEEIIQYVVGTLQPKLKRFLRHPLPKTLEQLIQRGKEVQDGLDQASEPAGPQLPAEEEAEALTPALTSESVASDRTQPE

SEQ ID NO: 158 - protein, 399 aa, Bufo bufo
MAASMALSGIGAPALSVPEKTVALQIGTCSPAEMLDRVRKTQVYILSGVSRQVENELKGFKRSVQRLNSNMHYDSSVVGIQRWKRSIKSCLLRCQDTLVNLERWMKREMNSWRGVFSRFEKMVSKADQNLCRTCKMEEKHRWSFYGEKSEKEKEADANQEIVDPYAPSPPSSPPPPPPPLPAQSCHPHHWVVISVDILSPPEFDAGMSEDPREFLVNLEKFFKRSGWNEKVWLSQVDNHLKGAAKKWWEYRQETVESWHDFKVAFLQYCERIVVREAIKRDLDLPQRRWEPLEQFVWKKRALYHRLYVDANEEDMIRYIISTLHPEIKRFLKSPLPKTMDQLVQMGKEIQFDFEQSEKQTLKAAYSDEQISTKLNVIVTKDPYDSNSIVTEKSSYIEGY

SEQ ID NO: 159 - protein, 389 aa, Rana temporaria
MAASLALSGVVAPALPLPEQTVALQIGTCSPAEMLDRVRKTQVYILSGVSRQVESELKGFKRSVQRLNANMNDQSPLVGIQRWKRSIKACLMRCQDTLVNLERWMKREMNSWRGVFSRFEKMVGKEELQRRSFYGEKSAKEKEAEAAQIAQEVLDNPNPYAPTPPCSPPPPALPSQSCQQHHWVVLSVDLLSPPEFDANMSEDPRDFLVNLEKYFKRSGWHEKIWLSQVDNHLKGAAKKWWEFRQETIDNWHDFKVSFLQYCERLVVREAIKRDLDLPQRRWEPLEQFVWKKRALYHRLYVDANEEDMIRFIISTLHPEIRRFLKPPFPKTMDQLVQMGKEIQFEFEQSEKQTLKAAYSDEQISTKLNVLVTKDPYDSNSVCTEKASYE

SEQ ID NO: 160 - protein, 396 aa, Oryx dammah
MELDHRTTGGLHAYPGPRGGPAAKPNVILQIGKCRAEMLEHVRRTHRHLLAEVSKQVERELKGLHRSVGKLESNLDGYVPTGDSQRWKKSIKACLSRCQETIANLERWVKREMHVWREVFYRLERWADRLESGGGKYPVGSDPARHTVSVGVGGPESYCQEADNYDYTVSPYAITPPPATGQLPGQEEVEAQQYPPWEPGEDGQLSPGVDTQVFEDPREFLSHLEDYLRQVGGSEEYWLSQIQNHMNGPAKKWWEFKQGSVKNWVEFKKEFLQYSEGTLSREAIQRELDLPQKQGEPLDQFLWRKRDLYQTLYVDAEEEEIIQYVVGTLQPKLKRFLRPPLPKTLEQLIQKGMEVQDGLERAAEPTGPHPPAEEEAEALTPALTNESVASDRTQPE

SEQ ID NO: 161 - protein, 404 aa, Hirundo rustica
MQLDNVTSAGVHSFQGHRGVANKPNVILQIGKCRAEMLEHVQRTHRHLLTEVSKQVERELKGLQKSVGKLENNLEDHVPTENQRWKKSIKACLARCQETIAHLERWVKREMNVWKEVFFRLEKWADRLESMGGKYCPGEQGKQTVSVGVGGPEIRPGEGEIYDYALDMSQMYALTPPPGEVPSIPQGHDSYQWVSVSEDAPASPVETQVFEDPREFLSHLEEYLKQVGGTEEYWLSQIQNHMNGPAKKWWEYKQDSVKNWVEFKKEFLQYSEGTLTRDAIKRELDLPQKEGEPLDQFLWRKRDLYQTLYVDADEEEIIQYVVGTLQPKLKRFLSYPLPKTLEQLIQRGKEVQGTVEHSEEPSPQRTPEVQPGDSVETVPPSTTASPVPSNGTQPEPPSPPATVI

SEQ ID NO: 162 - protein, 398 aa, Pteropus giganteus
MELDHMTSGGLHTYPGPRGGPAAKPNVILQIGKCRAEMLEHVRRTHRHLLTEVSKQVERELKGLHRSVGKLESNLDGYVPTSDSQRWRKSIKACLSRCQETIANLERWVKREMHVWREVFYRLERWADRLESMGGKYPVGSEPARHTVSVGVGGPEGYSHEADGYDYTVSPYAITPPPAAGELPGQEPEEAQQYTPWVPGEDGQPSPGVDTQIFEDPREFLSHLEEYLRQVGGSEEYWLSQIQNHMNGPAKKWWEFKQGSVRNWVEFKKAFLQYSEGTLSREAIQRELDLPQKQGEPLDQFLWRKRDLYQTLHVDAEEEEVIQYVVGTLQPKLKRFLRHPLPKTLEQLIQRGMEVQDDLEQGPEPASPLRAAEDEAEAEALTPALTNESVASDRTQPE

SEQ ID NO: 163 - protein, 404 aa, Passer montanus; identical to SEQ ID NO: 152

SEQ ID NO: 164 - protein, 405 aa, Mauremys reevesii; identical to SEQ ID NO: 132

SEQ ID NO: 165 - protein, 408 aa, Crotalus tigris
MQVDNFNHGNLHSSQGHRGMANNKPNVILQIGKCRAEMLDHVRRTHRHLLTEVSKQVERELKGLQKSVGRLENNLEDHVPSAAENQRWKKSIKACLARCQETIAHLERWVKREINVWKEVFFRLEKWADRLESGGGKYPHADHARQTVSVGVGGPEIQPSKDEIYDYALDMSQMYALTPPPIGEAPSVPQPHDSYQWITVPEDTPSSPVETQIFEDPREFLTHLEDYLKQVGGTEEYWLSQIQNHMNGPAKKWWEYKQDSVKNWLEFKKEFLQYSEGTLTRDAIRQELDLPQKNGEPLDQFLWRKRDLYQTLHTEADEEEIIQYVVGTLQPKLKHFLSHPYPKTLEQLIQRGKEVEGNFDHSEEPSPQRSPKNQLGGSVESLPPSSTASPVASDETHPDVSAPPATVI

SEQ ID NO: 166 - protein, 396 aa, Hyaena hyaena
MELDHMTSGGLHAYPGPRGGPAAKPNVILQIGKCRAEMLEHVRRTHRHLLTEVSKQVERELKGLHRSVGKLESNLDGYVPTGDSQRWKKSIKACLCRCQETIANLERWVKREMHVWREVFYRLERWADRLESMGGKYPVGSEPARHTVSVGVGGPESYCHDADGYDYTVSPYAITPPPASGELPGQEAVEAQQYPPWAPGEDGQPSPGVDTQIFEDPREFLSHLEEYLRQVGGSEEYWLSQIQNHMNGPAKKWWEFKQGSVKNWVEFKKEFLQYSEGTLSREAIQRELDLPQKQGEPLDQFLWRKRDLYQTLYVDAEEEEIIQYVVGTLQPKLKRFLRHPLPKTLEQLIQRGKEVQDGLEQASEPAGPPLPADEEAETLTPALTSESVASDRTQPE

SEQ ID NO: 167 - protein, 401 aa, Tachyglossus aculeatus
MELDRMNPSSGLHPSSGLHPYPGQRAGVTAKPNVILQIGKCRAEMLEHVRKTHRHLLAEVSRQVERELKGLHKSVGKLESNLDGYVPSSDSQRWKKSIKACLSRCQETIAHLERWVKREMNVWREVFYRLERWADRLEAMGGKYPAGEQARRTVSVGVGGPETSCPGEESYDCPISPYAIPPSTGESPESLDQGDQHYQQWFALPEESPVSPGVDTQIFEDPREFLRHLEKYLKQVGGTEEDWLSQIQNHMNGPAKKWWEYKQGSVKNWLEFKKEFLQYSEGTLTRDALKRELDLPQKQGEPLDQFLWRKRDLYQTLYVDADEEEIIQYVVGTLQPKLKRFLHHPLPKTLEQLIQRGQEVQNGLEPTDDQAGQRTQSEDNDESLTPAVTNESTASEGTLPE

SEQ ID NO: 168 - protein, 404 aa, Dermochelys coriacea
MQLDSITNGSVHTFQAHRGVANKPNVILQIGKCRTEMLEHVRRTHRHLLTEVSKQVERELKGLQKSVGKLENNLEDHVPSTDNQRWKKSIKACLARCQETIAHLERWVKREMNVWREVFFRLEKWADRLESMGSKYGPTDHARQTVSVGVGGPEGRGNDGEIYDYALDMSQMYALTPLPGRTSLPQPHDSYQWITAPEDTPASPVETQIFEDPREFLSHLEEYLKQVGGTEEYWLSQIQNHMNGPAKKWWEYKQDSVKNWVEFKKEFLQYSEGTLTRDAIKRELDLPQKQGEPLDEFLWRKRDLYQTLYTDAEEEEIIQYVVGTLRPKFKRFLSHPLPKTLEQLIQRGKEVLSDFDQSEEPTPQRTPEHQPGDSVDSLTPSTTASPIASEETQPEPPSPPTTVI

SEQ ID NO: 169 - protein, 396 aa, Arvicola amphibius
MELDHRTTGGLHAYPAQRGGPAAKPNVILQIGKCRAEMLEHVRRTHRHLLTEVSKQVERELKGLHRSVGKLENNLDGYVPTGDSQRWKKSIKACLCRCQETIANLERWVKREMHVWREVFYRLERWADRLESMGGKYPVGSEPARHTVSVGVGGPEPYCQEADGYDYTVSPYAITPPPAAGELPDQESVEAQQYQSWGSGEDGQPSPGVDTQIFEDPREFLSHLEEYLRQVGGSEEYWLSQIQNHMNGPAKKWWEFKQGSVKNWVEFKKEFLQYSEGTLSREAIQRELDLPQKQGEPLDQFLWRKRDLYQTLYVDAEEEEIIQYVVGTLQPKLKRFLRHPLPKTLEQLIQRGMEVQDGLEQAAEPSGTPLPTEDETEALTPALTSESVASDRTQPE

SEQ ID NO: 170 - protein, 404 aa, Motacilla alba alba
MQLDNVTSAGVHSFQGHRGVANKPNVILQIGKCRAEMLEHVRRTHRHLLTEVSKQVERELKGLQKSVGKLENNLEDHVPTENQRWKKSIKACLARCQETIAHLERWVKREMNVWKEVFFRLEKWADRLESMGGKYCPGEQGKQTVSVGVGGPEIRPSEGEIYDYALDMSQMYALTPPPGEVPSIPQGHDSYQWVSVSEDAPASPVETQVFEDPREFLSHLEEYLKQVGGTEEYWLSQIQNHMNGPAKKWWEYKQDSVKNWVEFKKEFLQYSEGTLTRDAIKRELDLPQKEGEPLDQFLWRKRDLYQTLYVDADEEEIIQYVVGTLQPKLKRFLSYPLPKTLEQLIQRGKEAQGNMEHSEEPSPQRTPEVQPGDSVETVPPSTTASPVPSNGTQPEPPSPPATVI

SEQ ID NO: 171 - protein, 394 aa, Talpa occidentalis
MELDRMAGGGLHAYPGPRGAPAAKPNVILQIGKCRAEMLEHVRRTHRHLLTEVSKQVERELKGLHRSVGKLESNLDGYVPAGDSQRWKRSIKACLSRCQDTIAHLERWVKREMHVWREVFYRLERWADRLEAMGGKYPVGAEPPHPVSVGVGGPEGYCREADPYDYSVSPYAITPPPAAGELPGQEPDDAQYPPWAPGEDGPLSPGVDTQIFEDPREFLSHLEEYLRQVGGTEEYWLSQIQNHMNGPAKKWWEFKQGSVKNWVEFKKEFLQYSEGTLSREAMQRELDLPQKQGEPLDQFLWRKRDLYQTLYVDAEEEEIIQYVVGTLQPKLKRFLRHPLPKTLEQLIQRGMEVQDGLEQAAEPAAPRLAAEDEAEALTPALTNESVASDRTPPE

SEQ ID NO: 172 - protein, 404 aa, Falco rusticolus; identical to SEQ ID NO: 155

SEQ ID NO: 173 - protein, 406 aa, Artibeus jamaicensis
MELDHRTSGGLHAYPGPRGGPVAKPNVILQIGKCRTEMLEHVRRTHRHLLAEVSKQVERELKGLHRSVGKLESNLDGYVPASDSQRWKKSIKACLCRCQETIAHLERWVKREMHVWREIFYRLERWADRLEAMGTKYQVGSDPARHPVSVGVGGPEACGQEADGYDYTVSPYAITPPPAAGELPGQELEEAQQYPPWEPGEDGQPSPGVDTQIFEDPHEFLSHLEEYLRQVGGSEEYWLSQIQNHMNGPAKKWWEYKQGSVRNWVEFKKEFLQYSEGTLSREALQRELDLPQKQGEPLDQFLWRKRDLYQTLYVDAEEEEIIQYVVGTLQPKLKRFLRHPLPKTLEQLIQRGLEVQGGLEQAAEPASPQPPAEDEAEAEAENEAENEALTPALTNESVASDRTQPE

SEQ ID NO: 174 - protein, 402 aa, Sturnira hondurensis
MELDHRTSGGLHAYPGPRGGQVAKPNVILQIGKCRTEMLEHVRRTHRHLLAEVSKQVERELKGLHRSVGKLESNLDGYVPTSDSQRWKKSIKACLCRCQETIAHLERWVKREMHVWREIFYRLERWADRLEAMGSKYQVGSDPARHTVSVGVGGPEACGQEADGYDYTVSPYAITPPPAAGELPEQELEDAQQYPPWGTGEDGQPSPGVDTQIFEDPHEFLSHLEEYLRQVGGSEEYWLSQIQNHMNGPAKKWWEFKQGSVRNWVEFKKEFLQYSEGTLSREALQRELDLPQKQGEPLDQFLWRKRDLYQTLYVDADEEEIIQYVVGTLQPKLKRFLRHPLPKTLEQLIQRGLEVQGGLEQAAEPASPHPPAEDEAEAEAENEALTPALTNESVASDRTQPE

SEQ ID NO: 175 - protein, 517 aa, Manis pentadactyla
MGPRAGERALVTPAASAGGGSSPAWRGGAGRRGAGASGRLGQWEPRSPRGRPRARGGIKSPGGAWAQSSQLLRGLLLTSCCRRAEGPSAPLRPTHRRRLPHLRTAGLSGLRYPIASATGTQMELEHMRSGGLHAYPAPRGGPAAKPNVILQIGKCRAEMLEHVRRTHRHLLAEVSKQVERELKGLHRSVGKLESNLDGYVPTGDSQRWKKSIKACLCRCQETIANLERWVKREMHVWREVFYRLERWADRLESMGGKYPVGSEPAPHTVSVGVGGPEGYCHEADPYDYTVSPYAITPPPAAGEVPGQEPAEAQQYPPWGPGEEGQLSPGVDTQIFEDPREFLSHLEEYLRQVGGSEEYWLSQIQNHMNGPAKKWWEFKQGSVKNWVQFKKEFLQYSEGTLSREAMQRELDLPQKQGEPLDQFLWRKRDLYQTLYVDAEEEEIIQYVVGTLQPKLKRFLRHPLPKTLEQLIQRGMEVQDGLEQAAETASPHPPTEDEAEAVTPALTSESVASDRTQPE

SEQ ID NO: 176 - protein, 396 aa, Balaenoptera musculus
MELDRRTTGGLHAYPAPRGGPVAKPNVILQIGKCRAEMLEHVRRTHRHLLAEVSKQVERELKGLHRSVGKLESNLDGYVPTGDSQRWKRSIKACLCRCQETIANLERWVKREMHVWREVFYRLERWADRLESMGGKYPVGGNPSRHTVSVGVGGPESYGNEADTYDYTVSPYAITPPPAAGELPGQEAVEAQQYPPWGLGEDGQPSPGVDTQIFEDPREFLSHLEEYLRQVGGSEEYWLSQIQNHMNGPAKKWWEFKQGSVKNWVEFKKEFLQYSEGTLSREAIQRELDLPQKQGEPLDQFLWRKRDLYQTLHVDAEEEEIIQYVVGTLQPKLKRFLRPPLPRTLEQLIQKGMEVQDGLAQVAEPAGPRLPAEEESEALTPALTSESVASDRTQPE

SEQ ID NO: 177 - protein, 400 aa, Trichosurus vulpecula
MELEHMSSGGLHTYHGPRGGPAAKPNVILQIGKCRAEMLEHVRKTHRHLLTEVSKQVERELKGLHRSVGKLENNLDGYVPTGDSQRWKKSIKACLSRCQETIAHLERWVKREMNVWREVFYRLEKWADRLESMGGKYPVSGEAGRQTVSVGVGGPESYGQETDPYDYTVSPYAITPPTPAGVIGGGEALSHEPSDIQQYPPWSSTTEDGTLSPGVDTQIFEDPREFLSHLEEYLKQVGGTEEYWLSQIQNHMNGPAKKWWEYKQGSVKNWVEFKKEFLQYSEGTLTRDAIKRELDLPQKQGEPLDQFLWRKRDLYQTLYVDADEEEIIQYVVGTLQPKLKHFLRHPLPKTLEQLIQRGQEVQEGLEQGEDVTEQQTQSEDNDESLTPAIESLASDGTQPE

SEQ ID NO: 178 - protein, 573 aa, Pipistrellus kuhlii
  misc_feature (434)..(434): Xaa can be any naturally occurring amino acid
MELDHRTPGGLHAYPTPRGGPVAKPNVVLQIGKCRAEMLEHVRRTHRHLLAEVSKQVERELRGLHRSVGKLEGNLDGYVPPGDSLRWRRSIKACLSRCQDTIAHLERWVKREMHVWREVFYRLERWADRLEAAGAKHPAGGEPGRAVSVGVGGPEGCCQEADGYDYSVSPYAIPPPPAAGELPPGQALEDEEAQQYPPWGPGEDGQPLPGVDTQVFEDPHEFLSHLEEYLQQVGGSEEYWLSQIRNHMNGPAKKWWEFKQGSVKNWVQFKKEFLQYSEGTLSREALQRELDLPQKQGEPLDQFLWRKRDLYQTLYVDAEEEEIIQYVVGTLQPKLKRFLRHPLPKTLEQLIQRGLEVQGGLEQAEPAAPRPAPEEAGAQPEPEPEGALTPALTNESALPPPSGMGSGHRARDAPEPKRRQPVPRGPQLQGCSAXPAMAAQGSRPASDRTAHSRPGGSKLTPNPKAAAAAAAAAAAAAPAPGPSAASVIHAPAQRADSPRGQRVPRPQPPNELRWQRAPEPGARPQVSGSPEPRLLRLALPPPPPRAAAQEMPAASRGGCGEETPRRGTPRERC

SEQ ID NO: 179 - protein, 404 aa, Molothrus ater
MQLDNVTSAGVHSFQGHRGVANKPNVILQIGKCRAEMLEHVRRTHRHLLTEVSKQVERELKGLQKSVGKLENNLEDHVPTENQRWKKSIKACLIRCQETIAHLERWVKREMNVWKEVFFRLEKWADRLESMGGKYCPGEQGKQTVSVGVGGPEIRPSEGEIYDYALDMSQMYALTPPPGEVPSIPQGHDSYQWVSVSEDAPASPVETQVFEDPREFLSHLEEYLKQVGGTEEYWLSQIQNHMNGPAKKWWEYKQDSVKNWVEFKKEFLQYSEGTLTRDAIKRELDLPQKEGEPLDQFLWRKRDLYQTLYVDADEEEIIQYVVGTLQPKLKRFLSYPLPKTLEQLIQRGKEVQGNMEHSEEPSPQRTPEVQPGDSVETVPPSTTASPVPSNGTQPEPPSPPATVI

SEQ ID NO: 180 - protein, 406 aa, Myotis myotis
MELDHRTTGGLHAYPGPRGGPVAKPNVILQIGKCRTEMLEHVRRTHRHLLAEVSKQVERELKGLHRSVGKLESNLDGYVPTSDSQRWRKSIKACLCRCQETIAHLERWVKREMHVWREVFYRLERWADRLEAMGAKYPVGSEPARHTVSVGVGGPESCSQEADGYDYSVSPYAITSPPAAGELPGQELEEAQQYPPWGPGEDGQPHPGVDTQIFEDPHEFLSHLEEYLRQVGGTEEYWLSQIQNHMNGPAKKWWEYKQGSVKNWVEFKKEFLQYSEGTLSREAMQRELDLPQKQGEPLDQFLWRKRDLYQTLYVDADEEEVIQYVVGTLQPKLKRFLCHPLPKTLEQLIQRGLEVQGGLAQAEPAGPPRPAPEEAEAEAEAEAEAEEALTPALTNESVASDGTQPE

SEQ ID NO: 181 - protein, 395 aa, Molossus molossus
MELDRRTTGGLHTYPAPRGGPVAKPNVILQIGKCRTEMLEHVRRTHRHLLAEVSKQVERELKGLHRSVGKLENNLDGYVPTGDSQRWKKSIKACLCRCQETIANLERWVKREMHVWREVFYRLERWADRLEAMGSKEPVGSEPARHTVSVGVGGPESCCPEAEGYDYTVSPYAITPPPAAGQLPGQEELEDAQQYPPWGSSEDGQPNPGVDTQIFEDPHEFLSHLEEYLRQVGGSEEYWLSQVQNHMNGPAKKWWEFKQGSVKNWVEFKKEFLQYSEGTLSREALQRELDLPQKQGEPLDQFLWRKRDLYQTLYVDADEEEVIQYVVGTLQPKLKRFLRHPLPKTLEQLIQRGMEVQDDLELAAEPAGPQPPTEDEAVTPALTNESVASDRTQPE

SEQ ID NO: 182 - protein, 396 aa, Onychomys torridus
MELDHMTTGGLHAYPAQRGGPAAKPNVILQIGKCRAEMLEHVRRTHRHLLTEVSKQVERELKGLHRSVGKLENNLDGYVPTNDSQRWKKSIKACLCRCQETIANLERWVKREMHVWREVFYRLERWADRLESMGGKYPVGNEPARHTVSVGVGGPEPYCQEADGYDYTVSPYAITPPPAAGELPDQGSVEAQQYQSWGSGEDGQPSPGVDTQIFEDPREFLSHLEEYLRQVGGSEEYWLSQIQNHMNGPAKKWWEFKQGSVKNWVEFKKEFLQYSEGTLSREAIQRELDLPQKQGEPLDQFLWRKRDLYQTLYVDAEEEEIIQYVVGTLQPKLKRFLRHPLPKTLEQLIQRGMEVQDGLEQAAEPSGTPLPTEDETEALTPALTSESVASDRTQPE

SEQ ID NO: 183 - protein, 400 aa, Halichoerus grypus
MELDHMTSGGLHAYPGPRGGPAAKPNVILQIGKCRAEMLEHVRRTHRHLLTEVSKQVERELKGLHRSVGKLESNLDGYVPTGDSQRWKKSIKACLCRCQETIANLERWVKREMHVWREVFYRLEKWADRLESMGGKYPVGNDPARHTVSVGVGGPEGYCQEADGYDYTVSPYAITPPPATGELPGQEPVDAQQYPPWGPGEDGQPSPGVDTQIFEDPREFLSHLEEYLRQVGGSEEYWLSQIQNHMNGPAKKWWEFKQGSVKNWVEFKKEFLQYSEGTLSREAIQRELDLPQKQGEPLDQFLWRKRDLYQTLYVDAEEEEIIQYVVGTLQPKFKRFLRHPLPKTLEQLIQRGMEVQDGLEQAAEPAGPRLPTEDEAEAEAEALTPALTNESVTSDPTQPE

SEQ ID NO: 184 - protein, 404 aa, Cygnus atratus; identical to SEQ ID NO: 156

SEQ ID NO: 185 - protein, 404 aa, Oxyura jamaicensis
MQLDNVTNAGIHSFQGHRGVANKPNVILQIGKCRAEMLEHVRRTHRHLLSEVSKQVERELKGLQKSVGKLENNLEDHVPTDNQRWKKSIKACLARCQETIAHLERWVKREMNVWKEVFFRLEKWADRLESMGGKYCPGEHGKQTVSVGVGGPEIRPSEGEIYDYALDMSQMYALTPPPGEVPSIPQGHDSYQWVSVSEEAPASPVETQVFEDPREFLSHLEEYLKQVGGTEEYWLSQIQNHMNGPAKKWWEYKQDSVKNWVEFKKEFLQYSEGTLTRDAIKRELDLPQKEGEPLDQFLWRKRDLYQTLYVDADEEEIIQYVVGTLQPKLKRFLSYPLPKTLEQLIQRGKEVQGNMDHSDEPSPQRTPEIQSGDSVESMPPSTTASPVPSNGTQPEPPSPPATVI

SEQ ID NO: 186 - protein, 407 aa, Zootoca vivipara
MQLDNINQVNLHSFQGHRGVANNNKPNVILQIGKCRAEMLDHVRRTHRHLLTEVSKQVERELKGLQKSVGKLENNLEDHVPSAAENQRWKKSIKACLSRCQETIAHLERWVKREMNVWKEVFFRLEKWADRLESGGAKYCHGDNHRQTVSVGVGGPEIRPSEGEIYDYALDMSQMYALTPPPSGDVPIVPQSHDSYQWVSVSEDTPPSPVETQIFEDPREFLTHLEDYLKQVGGTEEYWLSQIENHMNGPAKKWWEYKQDSVKNWLEFKKEFLQYSEGTLTRDAIKRELDLPQKDGEPLDQFLWRKRDLYQTLYVDAEEEEVIQYVVGTLQPKLKRFLSHPYPKTLEQLIQRGKEVEVNYDNSEEPSPQRTPELRDSLESIPPSTTASPVASDGTQPEVSVPPTTVI

SEQ ID NO: 187 - protein, 400 aa, Mirounga leonina; identical to SEQ ID NO: 128

SEQ ID NO: 188 - protein, 405 aa, Trachemys scripta elegans
MQLDSITNGSVHTFQGHRGVANKPNVILQIGKCRAEMLEHVRRTHRHLLTEVSKQVERELKGLQKSVGKLENNLEDHVPSTDNQRWKKSIKACLARCQETIAHLERWVKREMNVWREVFFRLEKWADRLESMGGKYGPTDHARQTVSVGVGGPESRGNDGEIYDYALDMSQMYALTPSPGEITSMPQPHDSYQWITAPEDAPASPVETQIFEDPREFLSHLEEYLKQVGGTEEYWLSQIQNHMNGPAKKWWEYKQDSVKNWVEFKKEFLQYSEGTLTRDAIKRELDLPQKQGEPLDEFLWRKRDLYQTLYTDAEEEEIIQYVVGTLRPKFKRFLSHPLPKTLEQLIQRGKEVLSDFDQSEEPTPQRTPEHQPGDSVSSLPPSTTASPIASDETQPEPPTPPATVI

SEQ ID NO: 189 - protein, 396 aa, Arvicanthis niloticus
MELDHMTTGGLHAYPAPRGGPAAKPNVILQIGKCRAEMLEHVRRTHRHLLTEVSKQVERELKGLHRSVGKLENNLDGYVPTGDSQRWKKSIKACLCRCQETIANLERWVKREMHVWREVFYRLERWADRLESMGGKYPVGSEPARHTVSVGVGGPEPYCQEADGYDYTVSPYAITPPPAAGELPEQESVEAQQYQSWGPGEDGQPSPGVDTQIFEDPREFLSHLEEYLRQVGGSEEYWLSQIQNHMNGPAKKWWEFKQGSVKNWVEFKKEFLQYSEGTLSREAIQRELDLPQKQGEPLDQFLWRKRDLYQTLYVDAEEEEIIQYVVGTLQPKLKRFLRHPLPKTLEQLIQRGMEVQDGLEQAADPSGTPLPTEDETEALTPALTSESVASDRTQPE

SEQ ID NO: 190 - protein, 409 aa, Pantherophis guttatus
MMQVDNFNHGNLHSCQGHRGVANNKPNVILQIGKCRADMLEHVRRTHRHLLTEVSKQVERELKGLQKSVGKLENNLEDHVPSAVENQRWKKSIKACLARCQETIAHLERWVKREINVWKEVFFRLEKWADRLESGGGKYSHADQSRQTVSVGVGAPEIQPSKEEIYDYALDMSQMYALTSPPMGEDPSVPQSHDSYQWITVSDDTPPSPVETQIFEDPREFLTHLEDYLKQVGGTEEYWLSQIQNHMNGPAKKWWEYKQDSVKNWLEFKKEFLQYSEGTLTRDAIKQELDLPQKDGEPLDQFLWRKRDLYQTLYIDAEEEEVIQYVVGTLQPKLKRFLSHPYPKTLEQLIQRGKEVEDNLDNSEEPSPQRSPKNQLGGSVESLPPSSTASPVASDETHPDVSAPPVTVI

SEQ ID NO: 191 - protein, 396 aa, Trachypithecus francoisi
MELDHRTSGGLHAYPGPRGGPAAKPNVILQIGKCRAEMLEHVRRTHRHLLTEVSKQVERELKGLHRSVGKLESNLDGYVPTSDSQRWKKSIKACLCRCQETIANLERWVKREMHVWREVFYRLERWADRLESTGGKYPVGSEPARHTVSVGVGGPESYCHEADGYDYTVSPYAITPPPAAGELPGQEPAEAQQYQPWVPGEDGQPSPGVDTQIFEDPREFLSHLEEYLRQVGGSEEYWLSQIQNHMNGPAKKWWEFKQGSVKNWVEFKKEFLQYSEGTLSREAIQRELDLPQKQGEPLDQFLWRKRDLYQTLYVDADEEEIIQYVVGTLQPKLKRFLRHPLPKTLEQLIQRGMEVQDDLEQAAEPAVPHVPAEDEAEALTPAPNSESVASDRTQPE

SEQ ID NO: 192 - protein, 407 aa, Lacerta agilis
MQLDNINQVNLHSFQGHRGVANNNKPNVILQIGKCRAEMLDHVRRTHRHLLTEVSKQVERELKGLQKSVGKLENNLEDHVPSAAENQRWKKSIKACLSRCQETIAHLERWVKREMNVWKEVFFRLEKWADRLESGGAKYCHGDNHRQTVSVGVGGPEIRPSEGEIYDYALDMSQMYALTPPPSGDVPIMPQPHDSYQWVSVSEDTPPSPVETQIFEDPREFLTHLEDYLKQVGGTEEYWLSQIENHMNGPAKKWWEYKQDSVKNWLEFKKEFLQYSEGTLTRDAIKRELDLPQKDGEPLDQFLWRKRDLYQTLYVDAEEEEVIQYVVGTLQPKLKRFLSHPYPKTLEQLIQRGKEVEVNFDNSEEPSPQRTPELRDSLESLPPSTTASPVASDGTQPEVSVPPTTVI

SEQ ID NO: 193 - protein, 400 aa, Rhinolophus ferrumequinum
MELDHMTSGGLHAYPGPRGAPAAKPNVILQIGKCRTEMLEHVRRTHRHLLTEVSKQVERELKGLHRSVGKLESNLDGYVPTGDSQRWKKSIKACLCRCQETIANLERWVKREMHVWREVFYRLERWADRLEAMGSKYPVGTESARHTVSVGVGGPEGYRNEADGYDYTVSPYAITPPPAAGEVPGEEPEESQEYPPWGPGEDGQPSPGVDTQIFEDPREFLSHLEEYLRQVGGSEEYWLSQIQNHMNGPAKKWWEYKQGSVKNWVEFKKEFLQYSEGTLSREALQRELDLPQKQGEPLDQFLWRKRDLYQTLHVDAEEEEVIQYVVGTLQPKLKRFLRHPLPKTLEQLIQRGMEVQDDLERAAEPVSSHLSAEAEAEAEAESLTPVLTNDSVASDLTQPE

SEQ ID NO: 194 - protein, 404 aa, Catharus ustulatus
MQLDNVTSAGVHSFQGHRGVANKPNVILQIGKCRAEMLEHVRRTHRHLLTEVSKQVERELKGLQKSVGKLENNLEDHVPTENQRWKKSIKACLARCQETIAHLERWVKREMNVWKEVFFRLEKWADRLESMGGKYCPGEQGKQTVSVGVGGPEIRPGEGEIYDYALDMSQMYALTPPPGEVPSIPQGHDSYQWVSVSEDAPASPVETQVFEDPREFLSHLEEYLKQVGGTEEYWLSQIQNHMNGPAKKWWEYKQDSVKNWVEFKKEFLQYSEGTLTRDAIKRELDLPQKEGEPLDQFLWRKRDLYQTLYVDADEEEIIQYVVGTLQPKLKRFLSYPLPKTLEQLIQRGKEVQGNMEHSEEPSPQRTPEVQPGDSVETVPPSTTASPVPSNGTQPEPPSPPATVI

SEQ ID NO: 195 - protein, 396 aa, Rattus rattus; identical to SEQ ID NO: 15

SEQ ID NO: 196 - protein, 396 aa, Lontra canadensis
MELDHRTSGGLHAYPGPRGGPAAKPNVILQIGKCRAEMLEHVRRTHRHLLTEVSKQVERELKGLHRSVGKLESNLDGYVPTGDSQRWRKSIKACLCRCQETIANLERWVKREMHVWREVFYRLEKWADRLESMGGKYPVGNEPGRHTVSVGVGGPEGYCQEADGYDYPVSPYAITPPPAAGELPGQDPGEAQQYPPWGSSEDGQPSPGVDTQIFEDPREFLSHLEEYLRQVGGSEEYWLSQIQNHMNGPAKKWWEFKQGSVKNWVEFKKEFLQYSEGTLSREAIQRELDLPQKQGEPLDQFLWRKRDLYQTLYVDAEEEEIIQYVVGTLQPKLKRFLRHPLPKTLEQLIQRGREVQDDLEQGAEPAGTPVPTEDEPDALTPALTSESVASDRTQPE

SEQ ID NO: 197 - protein, 405 aa, Chelonoidis abingdonii
MQLDSVTNGSVHTFQGHRGVVNKPNVILQIGKCRAEMLEHVRRTHRHLLTEVSKQVERELKGLQKSVGKLENNLEDHVPSTDNQRWKKSIKACLARCQETIAHLERWVKREMNVWREVFFRLEKWADRLESMGGKYGPTDHARQTVSVGVGGPESRGNDGEIYDYALDMSQMYALTPSPGEITSMPQPHDSYQWITAPEDAPPSPVETQIFEDPREFLSHLEEYLKQVGGTEEYWLSQIQNHMNGPAKKWWEYKQDSVKNWVEFKKEFLQYSEGTLTRDAIKRELDLPQKQGEPLDEFLWRKRDLYQTLYTDAEEEEIIQYVVGTLRPKFKRFLSHPLPKTLEQLIQRGKEVLSDFDQSEEPTPQRTPEHQPGDSVDSLPPSNTASPIASDETQPEPPTPPATVI

SEQ ID NO: 198 - protein, 396 aa, Hylobates moloch
MELDQRTSGGLHAYPGPRGGQVAKPNVVLQIGKCRAEMLEHVRRTHRHLLAEVSKQVERELKGLHRSVGKLESNLDGYVPTSDSQRWKKSIKACLCRCQETIANLERWVKREMHVWREVFYRLERWADRLESTGGKYPVGSESARHTVSVGVGGPESYCHEADGYDYTVSPYAITPPPAAGELPGQEPAEAQQYQPWVPGEDGQPSPGVDTQIFEDPREFLSHLEEYLRQVGGSEEYWLSQIQNHMNGPAKKWWEFKQGSVKNWVEFKKEFLQYSEGTLSREAIQRELDLPQKQGEPLDQFLWRKRDLYQTLYVDADEEEIIQYVVGTLQPKLKRFLRHPLPKTLEQLIQRGMEVQDDLEQAAEPAGPHLPAEDEAEALTPAPNSESVASDPTQPE

SEQ ID NO: 199 - protein, 405 aa, Chiroxiphia lanceolata
MQLDNVTNAGIHSFQGHRGVANKPNVILQIGKCRAEMLEHVRRTHRHLLTEVSKQVERELKGLQKSVGKLENNLEDHVPTENQRWKKSIKACLARCQETIAHLERWVKREMNVWKEVFFRLEKWADRLESMGGKYCPGDQGKQTVSVGVGGPEIRPSEGEIYDYALDMSQMYALTPPPGEVPSIPQGHDSYQWVSVSEDAPASPVETQVFEDPREFLSHLEEYLKQVGGTEEYWLSQIQNHMNGPAKKWWEYKQDSVKNWVEFKKEFLQYSEGTLTRDAIKRELDLPQKEGEPLDQFLWRKRDLYQTLYVDADEEEIIQYVVGTLQPKLKRFLSYPLPKTLEQLIQRGKEVQGSIEHSEEPSPQRTPEIQPGDSVDTVPPSTTASPVPSNGTQPEQPPSPPATVI

SEQ ID NO: 200 - protein, 396 aa, Phocoena sinus
MELDQRTTGGLHAYPAPRGGPVAKPNVILQIGKCRAEMLEHVRRTHRHLLTEVSKQVERELKGLHRSVGKLESNLDGYVPTGDSQRWRKSIKACLCRCQETIANLERWVKREMHVWREVFYRLERWADRLESMGGKYPVDGNPSRHTTSVGVGGPESYGHEADTYDYTVSPYAITPPPAAGELPGQEAVEAQQYPPWGLGEDGQPSPGVDTQIFEDPREFLSHLEEYLRQVGGSEEYWLSQIQNHMNGPAKKWWEFKQGSVKNWVEFKKEFLQYSEGALSREAVQRELDLPQKQGEPLDQFLWRKRDLYQTLYVDAEEEEIIQYVVGTLQPKLKRFLRPPLPKTLEQLIQKGMEVQDGLEQAAEPASPRLPTEEESEALTPALTSESVASDRTQPE

SEQ ID NO: 201 - protein, 398 aa, Phoca vitulina
MELDHMTSGGLHAYPGPRGGPAAKPNVILQIGKCRAEMLEHVRRTHRHLLTEVSKQVERELKGLHRSVGKLESNLDGYVPTGDSQRWKKSIKACLCRCQETIANLERWVKREMHVWREVFYRLEKWADRLESMGGKYPVGNDPARHTVSVGVGGPEGYCQEADGYDYTVSPYAITPPPATGELPGQEPVDAQQYPPWGPGEDGQPSPGVDTQIFEDPREFLSHLEEYLRQVGGSEEYWLSQIQNHMNGPAKKWWEFKQGSVKNWVEFKKEFLQYSEGTLSREAIQRELDLPQKQGEPLDQFLWRKRDLYQTLYVDAEEEEIIQYVVGTLQPKFKRFLRHPLPKTLEQLIQRGMEVQDGLEQAAEPAGPRLPTEDEAEAEALTPALTNESVTSDPTQPE

SEQ ID NO: 202 - protein, 396 aa, Mustela erminea
MELDHRTSGGLHAYPGPRGGPAAKPNVILQIGKCRAEMLEHVRRTHRHLLTEVSKQVERELKGLHRSVGKLESNLDGYVPTGDSQRWRKSIKACLCRCQETIANLERWVKREMHVWREVFYRLEKWADRLESMGGKYPVGNEPSRHTVSVGVGGPEGYCQEADGYDYPVSPYAITPPPAAGELPGQEPGEDQQYPPWGSSEDGQPSPGVDTQIFEDPREFLSHLEEYLRQVGGSEEYWLSQIQNHMNGPAKKWWEFKQGSVKNWVEFKKEFLQYSEGTLSREAIQRELDLPQKQGEPLDQFLWRKRDLYQTLYVDAEEEEIIQYVVGTLQPKLKRFLRHPLPKTLEQLIQRGREVQDGLEQGAEPTGTPVPTEDEPDALTPALTSESVASDRTQPE

SEQ ID NO: 203 - protein, 398 aa, Sapajus apella
MELDHRTSGGLHAYPGPRGGPAAKPNVILQIGKCRAEMLEHVRRTHRHLLTEVSKQVERELKGLHRSVGKLESNLDGYVPTGDSQRWKKSIKACLCRCQETIANLERWVKREMHVWREVFYRLERWADRLESMGGKYPVGSEPARHTVSVGVGGPESYGQEADGYDYTVSPYAITPPPATGELPGQEPAEAQQYQAWVPGEDGQPSPGVDTQIFEDPREFLSHLEEYLRQVGGSEEYWLSQIQNHMNGPAKKWWEFKQGSVKNWVEFKKEFLQYSEGTLSREAIQRELDLPQKQGEPLDQFLWRKRDLYQTLYVDADEEEIIQYVVGTLQPKLKRFLRHPLPKTLEQLIQRGMEVQDDLEQAAEPAGPGPHVPAEDEAETLTPAPNSESVASDRTQPE

SEQ ID NO: 204 - protein, 409 aa, Thamnophis elegans
MLQVENVNHGNLHSYQGHRGMANNKPNVILQIGKCRADMLDHVRRTHRHLLTEVSKQVERELKSLQKSVGKLENNLEDHVPSAAENQRWKKSIKSCLARCQETIAHLERWVKREINVWKEVFFRLEKWADRLESGGGKYSHGDQGRQMVSVGVGTPEIQPSKEEIYDYALDMSQMYALTSPPIGEDPSVPQPHDSYQWITVSDDAPSSPVETQIFEDPREFLTHLEDYLKQVGGTEDYWLSQIQNHMNGPAKKWWEYKQDSVKNWLEFKKEFLQYSEGTLTRDAIKQELDLPQKDGEPLDQFLWRKRDLYQTLYIDAEEEDVIQYVVGTLQPKLKRFLSHPYPKTLEQLIQRGKEVEGSLDNSEEPSPQRSPKLQLGGSVESLPPSSMASPVASDATHADVSAPPVTVI

SEQ ID NO: 205 - protein, 404 aa, Aythya fuligula; identical to SEQ ID NO: 114

SEQ ID NO: 206 - protein, 404 aa, Corvus moneduloides; identical to SEQ ID NO: 194

SEQ ID NO: 207 - protein, 404 aa, Phasianus colchicus
MQLDNVTNAGIHSFQGHRGVANKPNVILQIGKCRAEMLEHVRRTHRHLLSEVSKQVERELKGLQKSVGKLENNLEDHVPTDNQRWKKSIKACLARCQETIAHLERWVKREMNVWKEVFFRLEKWADRLESMGGKYCPGEHGKQTVSVGVGGPEIRPSEGEIYDYALDMSQMYALTPAPGEVPSIPQAHDSYQWVSVSEDAPASPVETQIFEDPHEFLSHLEEYLKQVGGTEEYWLSQIQNHMNGPAKKWWEYKQDSVKNWVEFKKEFLQYSEGTLTRDAIKRELDLPQKEGEPLDQFLWRKRDLYQTLYVDADEEEIIQYVVGTLQPKLKRFLSYPLPKTLEQLIQRGKEVQGNMDHSEEPSPQRTPEIQSGDSVESVPPSTTASPVPSNGTQPEPPSPPATVI

SEQ ID NO: 208 - protein, 396 aa, Mastomys coucha
MELDHMTTGGLHAYPAPRGGPAAKPNVILQIGKCRAEMLEHVRRTHRHLLTEVSKQVERELKGLHRSVGKLENNLDGYVPTGDSQRWKKSIKACLCRCQETIANLERWVKREMHVWREVFYRLERWADRLESMGGKYPVGSEPARHTVSVGVGGPEPYCQEADGYDYTVSPYAITPPPAAGELPEQESVEAQQYQSWGPGEDGQPSPGVDTQIFEDPREFLSHLEEYLRQVGGSEEYWLSQIQNHMNGPAKKWWEFKQGSVKNWVEFKKEFLQYSEGTLSREAIQRELDLPQKQGEPLDQFLWRKRDLYQTLYVDAEEEEIIQYVVGTLQPKLKRFLRHPLPKTLEQLIQRGMEVQDGLEQAAEPSGTPLPTEDETEALTPALTSESVASDRTQPE

SEQ ID NO: 209 - protein, 404 aa, Camarhynchus parvulus; identical to SEQ ID NO: 179

SEQ ID NO: 210 - protein, 396 aa, Globicephala melas
MELDQRTTGGLHAYPAPRGGPVAKPNVILQIGKCRAEMLEHVRRTHRHLLTEVSKQVERELKGLHRSVGKLESNLDGYVPTGDSQRWRKSIKACLCRCQETIANLERWVKREMHVWREVFYRLERWADRLESMGGKYPAGSNPSRHTTSVGVGGPESYGHEADTYDYTVSPYAITPPPATGELPGQEAVEAQQYPPWGLGEDGQPSPGVDTQIFEDPREFLSHLEEYLRQVGGSEEYWLSQIQNHMNGPAKKWWEYKQGSVKNWVEFKKEFLQYSEGALSREAVQRELDLPQKQGEPLDQFLWRKRDLYQTLYVDADEEEIIQYVVGTLQPKLKRFLRPPLPKTLEQLIQKGMEVEDGLEQVAEPASPHLPTEEESEALTPALTSESVASDRTQPE

SEQ ID NO: 211 - protein, 405 aa, Gopherus evgoodei
MQLDSITNGSVHTFQGHRGTVNKPNVILQIGKCRAEMLEHVRRTHRHLLTEVSKQVERELKGLQKSVGKLENNLEDHVPSTDNQRWKKSIKACLARCQETIAHLERWVKREMNVWREVFFRLEKWADRLESMGGKYGPTDHARQTVSVGVGGPESRGNDGEIYDYALDMSQMYALTPSPGEITSMPQPHDSYQWITAPEDAPASPVETQIFEDPREFLSHLEEYLKQVGGTEEYWLSQIQNHMNGPAKKWWEYKQDSVKNWVEFKKEFLQYSEGTLTRDAIKRELDLPQKQGEPLDEFLWRKRDLYQTLYTDAEEEEIIQYVVGTLRPKFKRFLSHPLPKTLEQLIQRGKEVLSDFDQSEEPTPQRTPEHQPGDSVDSLPPSTTASPIASDETQPEPPTPPATVI

SEQ ID NO: 212 - protein, 404 aa, Strigops habroptila
MQLDNVTNAGIHSFQGHRGVANKPNVILQIGKCRAEMLEHVRRTHRHLLTEVSKQVERELKGLQKSVGKLESNLEDHVPTDNQRWKKSIKACLARCQETIAHLERWVKREMNVWKEVFFRLEKWADRLESMGGKYCPGEHGKQTVSVGVGGPEIRPSEGEIYDYALDMSQMYALTPPPGEVPSIPQAHDSYQWVSVSEDAPTSPVETQVFEDPREFLSHLEEYLKQVGGTEEYWLSQIQNHMNGPAKKWWEYKQDSVKNWVEFKKEFLQYSEGTLTRDAIKRELDLPQKEGEPLDQFLWRKRDLYQTLYVDADEEEIIQYVVGTLQPKLKRFLSYPLPKTLEQLIQRGKEVQGSMDHSEEPSPQRTPEIQAGDSVETVPPSTTASPVPSNGTQPEPPSPPATVI
